(19) United States
(12) Patent Application Publication
(10) Pub. No.: US 2005/0119210 A1
(43) Pub. Date: Jun. 2, 2005

(54) Compositions and methods for diagnosing and treating cancers

(76) Inventors: Xiaobing Be, Medford, MA (US); Wei Liu, Sudbury, MA (US); Donna K. Slonim, North Andover, MA (US); Steve Howes, Cambridge, MA (US)

Correspondence Address: NIXON PEABODY, LLP, 401 9TH STREET, NW, SUITE 900, WASHINGTON, DC, 20004-2128, US

(21) Appl. No.: 10/847,918

(22) Filed: May 19, 2004

Related U.S. Application Data
(60) Provisional application No. 60/471,729, filed on May 20, 2003.

(51) Int. Cl. A61K 48/00; C12Q 1/68; A61K 39/395; A61K 38/17; G01N 33/574

(52) U.S. Cl. 514/44; 514/12; 424/155.1; 435/6; 435/7.23

(57) ABSTRACT

Compositions and methods for diagnosing, monitoring, or treating cancers. Genes encoding transmembrane proteins that are over-expressed in colon, lung, breast, prostate, liver, stomach, esophagus, or kidney cancer tissues are identified. These transmembrane genes can be used as biological markers for the detection or diagnosis of cancers. These genes can also serve as targets for cancer therapeutics. In addition, these genes can also be used for screening for anti-cancer drugs.

### CROSS REFERENCE TO RELATED APPLICATIONS

[0001] This application claims priority from and incorporates by reference the entire disclosures of U.S. Provisional Application Ser. No. 60/471,729, filed May 20, 2003.

[0002] All materials recorded in compact discs labeled “Copy 1” and “Copy 2” are incorporated herein by reference in their entireties. Each of the compact discs includes a file entitled “Sequence Listing.ST25.txt” (2,406 KB, created on May 18, 2004).

### TECHNICAL FIELD

[0003] The present invention relates generally to the diagnosis and treatment of cancers. In particular, the present invention relates to genes encoding cancer-related transmembrane proteins that are overexpressed in cancer tissues and methods of using these genes for detecting, monitoring and treating cancers.

### BACKGROUND OF THE INVENTION

[0004] Cancer is a significant health problem throughout the world. The most frequently diagnosed cancers include colon cancer, lung cancer, breast cancer, prostate cancer, liver cancer, stomach cancer, esophagus cancer, and kidney cancer. These cancers represent a majority of cancers diagnosed in the U.S. population and account for over 90% of the cancer-related death in the U.S.

[0005] The five-year survival rate for patients with colon cancer detected in an early localized stage is 92%; unfortunately, only 37% of colon cancer is diagnosed at this stage. The survival rate drops to 64% if the cancer is allowed to spread to adjacent organs or lymph nodes, and to 7% in patients with distant metastases. Therefore, there is a need for early detection and diagnosis of cancers. Current therapies, such as chemotherapy, surgery or radiation, are inadequate for many cancer patients. Accordingly, there is another need for improved methods to treat cancers.

### SUMMARY OF THE INVENTION

[0006] The present invention provides compositions and methods for diagnosing and treating cancers. Cancers amenable to the present invention include colon, lung, breast, prostate, liver, stomach, esophagus, and kidney cancers. The present invention is based on the identification of transmembrane proteins that are over-expressed in at least one cancer tissue. These proteins are hereinafter referred to as “cancer-related transmembrane proteins” or “CRTPs.” The genes that encode these proteins are referred to as “cancer-related transmembrane protein genes” or “CRTPGs,” and the polynucleotides transcribed from or encoded by the CRTPGs are referred to as “cancer-related transmembrane protein nucleotides” or “CRTPNs.”

[0007] In one aspect, the present invention provides pharmaceutical compositions that are useful for treating or preventing cancers. In many embodiments, the pharmaceutical compositions of the present invention include a pharmaceutically acceptable carrier and an active component selected from the group consisting of (1) an agent capable of modulating the expression or protein activity of a CRTPG; (2) an antibody specific for a polypeptide encoded by a CRTPG; and (3) a T cell activated by a polypeptide encoded by a CRTPG. Example CRTPGs that are suitable for the present invention are depicted in Table 1a. In one embodiment, the CRTPG(s) is selected from the group consisting of ABCC4, C20orf103, CACNA1D, CDH6, CST, ENPP3, FLJ11856, GPR54, HAVCR1, SLC6A3, SLC30A4, TRG@, and TRPM4.

[0008] In another embodiment, the pharmaceutical compositions of the present invention include a polynucleotide capable of inhibiting or decreasing the expression of a CRTPG by RNA interference or an antisense mechanism. Example RNAi sequences include, but are not limited to, the siRNAs depicted in Table 3. In yet another embodiment, the pharmaceutical compositions of the present invention include an antibody which is conjugated with a toxic moiety. The antibody targets and kills cancer cells that overexpress a protein recognizable by the antibody. In still another embodiment, the pharmaceutical compositions of the present invention include a small molecule or drug that inhibits or reduces a protein activity of a CRTPG. In many examples, the inhibition is mediated by direct or indirect binding of the small molecule or drug to a protein encoded by the CRTPG.

[0009] In many other embodiments, the pharmaceutical compositions of the present invention are vaccine formulations. In one embodiment, the vaccines include a polypeptide containing an immunogenic fragment encoded by a CRTPG, or an expression vector encoding the polypeptide.

[0010] The present invention also features methods for treating or preventing cancers. These methods include the administration of a therapeutically or prophylactically effective amount of a pharmaceutical composition of the present invention to a patient in need thereof. In many embodiments, the patient has at least one cancer selected from colon cancer, lung cancer, breast cancer, prostate cancer, liver cancer, kidney cancer, stomach cancer, and esophageal cancer, and the pharmaceutical composition is prepared based on the CRTPG(s) selected according to Table 1b. In one embodiment, a pharmaceutical composition of the present invention is administered to the patient to inhibit or reduce the expression or protein activity of a CRTPG in cancer cells. In another embodiment, a pharmaceutical composition of the present invention is administered to the patient to elicit an immune response against cancer cells that overexpress a CRTPG.

[0011] In another aspect, the present invention provides methods that are useful for detecting, evaluating, or screening for compounds or other molecules that modulate the expression or protein activity of a CRTPG. The methods include contacting an agent of interest with cells expressing the CRTPG, and comparing the expression or protein activity of the CRTPG before and after the contact to determine if the agent is a modulator of the CRTPG. In one embodiment, the cells employed in the present invention are infected by at least one cancer selected from colon cancer, lung cancer, breast cancer, prostate cancer, liver cancer, kidney cancer, stomach cancer, and esophageal cancer, and the CRTPG is overexpressed in the cancer cells as compared to the cancer-free counterparts.

[0012] In still another aspect, the present invention provides methods for detecting or diagnosing cancers or monitoring the efficacy or effectiveness of a cancer treatment. These methods include detecting an expression profile of at least one CRTPG in a biological sample of a subject of interest, and comparing the expression profile to a reference expression profile of the CRTPG. In one embodiment, the subject of interest is a cancer patient, and the biological sample is a cancer tissue sample. In another embodiment, the cancer patient is treated by a therapy, and the effectiveness of the therapy is evaluated by monitoring the changes in the expression of CRTPGs that are overexpressed in untreated cancer cells. In still another embodiment, the reference expression profile is an average expression profile of the CRTPG in biological samples of cancer-free humans. In many embodiments, the expression profiles being compared are prepared from the same type of tissue by using the same or comparable methodology. Methods suitable for detecting expression profiles include, but are not limited to, RT-PCR, nucleic acid arrays, and immunoassays.

[0013] In addition, the present invention features cancer diagnostic kits or devices. In many embodiments, a diagnostic kit or device of the present invention includes a polynucleotide probe capable of hybridizing under stringent conditions to a gene selected from the group consisting of ABCC4, C20orf103, CACNA1D, CDH6, CST, ENPP3, FLJ11856, GPR54, HAVCR1, SLC6A3, SLC03A4, TRG@, and TRPM4, or an antibody specific for a polypeptide encoded by the gene. The polypeptide probes or antibodies in a diagnostic kit of the present invention can be stably attached to one or more substrate supports to make a nucleic acid or protein array.

[0014] Other features, objects, and advantages of the present invention are apparent in the detailed description that follows. It should be understood, however, that the detailed description, while indicating preferred embodiments of the present invention, is given by way of illustration only, not limitation. Various changes and modifications within the scope of the invention will become apparent to those skilled in the art from the detailed description.

### BRIEF DESCRIPTION OF THE DRAWINGS

[0015] The patent or application file contains at least one drawing executed in color. Copies of this patent or patent application publication with color drawings will be provided by the U.S. Patent and Trademark Office upon request and payment of the necessary fee. The drawings are provided for illustration, not limitation.

[0016] FIG. 1A shows the e-northern result of ABCC4 expression in cancerous versus cancer-free tissues. Like all other e-northern results, the ABCC4 e-northern result is composed of three parts, left, middle, and right. The left part lists the sample sets used to obtain the plot. It includes the sample set name and number of samples (in parenthesis) in the sample set. The middle part uses bars to describe the “present” percentage of individual samples in the sample set. The present percentage is proportional to the filled length of the bar, which is also labeled by the number below the bar. The right part is composed of numerous plots, each of which corresponds to one respective sample set. The vertical bar is positioned along the x-axis according to the expression value of each individual sample. The vertical bars are color coded as follows: red means absent, blue means present, and yellow means marginal. There are five numbers below the color-coded bars. The middle one is the median of expression values, the number to the left and next to the median is the 25% quantile, and the number to the right and next to the median is the 75% quantile. The leftmost number represents the position that is 1.5-fold interquantile distance away from the 25% quantile. The rightmost number represents the position that is 1.5-fold interquantile distance away from the 75% quantile.

[0017] FIG. 1B is the global analysis plot of ABCC4 expression in cancerous tissues. Like other global analysis plots, the x-axis in the ABCC4 plot describes the sample number, and the y-axis describes the expression value. Each light black dot represents the expression value of a single sample. The mean expression value for an individual tissue type is represented by a horizontal colored bar. The position of each colored bar indicates the mean expression value. The existence of blue dots below the mean bars means that the expression of those samples is called “present,” as described in Example 1.

[0018] FIG. 1C depicts the global analysis plot of ABCC4 expression in cancer-free tissues.

[0019] FIG. 1D shows the TMHMM profile of a human ABCC4 polypeptide consisting of the amino acid sequence recited in SEC ID NO: 16. A typical TMHMM plot contains two parts. The first part of the TMHMM profile gives statistics and locations of the predicted transmembrane helices and intervening loop regions. The second part of the TMHMM profile is a plot of probabilities, which shows the posterior probabilities of inside the membrane, outside the membrane, and transmembrane helix. At the top of the plot (between 1 and 1.2) is the N-best prediction.

[0020] FIG. 2A demonstrates the e-northern result of C20orf103 expression in cancerous versus cancer-free tissues.

[0021] FIG. 2B illustrates the global analysis of C20orf103 expression in cancerous tissues.

[0022] FIG. 2C shows the global analysis of C20orf103 expression in cancer-free tissues.

[0023] FIG. 2D indicates the TMHMM profile of a human C20orf103 polypeptide consisting of the amino acid sequence recited in SEC ID NO:17.

[0024] FIG. 3A demonstrates the e-northern result of CACNA1D expression in cancerous versus cancer-free tissues.

[0025] FIG. 3B illustrates the global analysis of CACNA1D expression in cancerous tissues.

[0026] FIG. 3C shows the global analysis of CACNA1D expression in cancer-free tissues.

[0027] FIG. 3D is the TMHMM profile of a human CACNA1D polypeptide consisting of the amino acid sequence recited in SEC ID NO:18.

[0028] FIG. 4A demonstrates the e-northern result of CDH6 expression in cancerous versus cancer-free tissues.

[0029] FIG. 4B illustrates the global analysis of CDH6 expression in cancerous tissues.

[0030] FIG. 4C shows the global analysis of CDH6 expression in cancer-free tissues.

[0031] FIG. 4D indicates the TMHMM profile of a human CDH6 polypeptide consisting of the amino acid sequence recited in SEC ID NO:19.

[0032] FIG. 5A depicts the e-northern result of CST expression in cancerous versus cancer-free tissues.

[0033] FIG. 5B illustrates the global analysis of CST expression in cancerous tissues.

[0034] FIG. 5C shows the global analysis of CST expression in cancer-free tissues.

[0035] FIG. 5D indicates the TMHMM profile of a human CST polypeptide consisting of the amino acid sequence recited in SEC ID NO:20.

[0036] FIG. 6A demonstrates the e-northern result of ENPP3 expression in cancerous versus cancer-free tissues.

[0037] FIG. 6B illustrates the global analysis of ENPP3 expression in cancerous tissues.

[0038] FIG. 6C shows the global analysis of ENPP3 expression in cancer-free tissues.

[0039] FIG. 6D indicates the TMHMM profile of a human ENPP3 polypeptide consisting of the amino acid sequence recited in SEC ID NO:21.

[0040] FIG. 7A demonstrates the e-northern result of FLJ11856 expression in cancerous versus cancer-free tissues.

[0041] FIG. 7B illustrates the global analysis of FLJ11856 expression in cancerous tissues.

[0042] FIG. 7C shows the global analysis of FLJ11856 expression in cancer-free tissues.

[0043] FIG. 7D depicts the TMHMM profile of a human FLJ11856 polypeptide consisting of the amino acid sequence recited in SEC ID NO:22.

[0044] FIG. 8A demonstrates the e-northern result of FOLH1 expression in cancerous versus cancer-free tissues.

[0045] FIG. 8B illustrates the global analysis of FOLH1 expression in cancerous tissues.

[0046] FIG. 8C shows the global analysis of FOLH1 expression in cancer-free tissues.

[0047] FIG. 8D indicates the TMHMM profile of a human FOLH1 polypeptide consisting of the amino acid sequence recited in SEC ID NO:23.

[0048] FIG. 9A demonstrates the e-northern result of GPR54 expression in cancerous versus cancer-free tissues.

[0049] FIG. 9B illustrates the global analysis of GPR54 expression in cancerous tissues.

[0050] FIG. 9C shows the global analysis of GPR54 expression in cancer-free tissues.

[0051] FIG. 9D indicates the TMHMM profile of a human GPR54 polypeptide consisting of the amino acid sequence recited in SEC ID NO:24.

[0052] FIG. 10A demonstrates the e-northern result of HAVCR1 expression in cancerous versus cancer-free tissues.

[0053] FIG. 10B illustrates the global analysis of HAVCR1 expression in cancerous tissues.

[0054] FIG. 10C shows the global analysis of HAVCR1 expression in cancer-free tissues.

[0055] FIG. 10D is the TMHMM profile of a human HAVCR1 polypeptide consisting of the amino acid sequence recited in SEC ID NO:25.

[0056] FIG. 11A demonstrates the e-northern result of OR51E2 expression in cancerous versus cancer-free tissues.

[0057] FIG. 11B illustrates the global analysis of OR51E2 expression in cancerous tissues.

[0058] FIG. 11C shows the global analysis of OR51E2 expression in cancer-free tissues.

[0059] FIG. 11D indicates the TMHMM profile of a human OR51E2 polypeptide consisting of the amino acid sequence recited in SEC ID NO:26.

[0060] FIG. 12A demonstrates the e-northern result of SLC6A3 expression in cancerous versus cancer-free tissues.

[0061] FIG. 12B illustrates the global analysis of SLC6A3 expression in cancerous tissues.

[0062] FIG. 12C shows the global analysis of SLC6A3 expression in cancer-free tissues.

[0063] FIG. 12D depicts the TMHMM profile of a human SLC6A3 polypeptide consisting of the amino acid sequence recited in SEC ID NO:27.

[0064] FIG. 13A demonstrates the e-northern result of SLC30A4 expression in cancerous versus cancer-free tissues.

[0065] FIG. 13B illustrates the global analysis of SLC30A4 expression in cancerous tissues.

[0066] FIG. 13C shows the global analysis of SLC30A4 expression in cancer-free tissues.

[0067] FIG. 13D indicates the TMHMM profile of a human SLC30A4 polypeptide consisting of the amino acid sequence recited in SEC ID NO:28.

[0068] FIG. 14A demonstrates the e-northern result of TRG@ expression in cancerous versus cancer-free tissues.

[0069] FIG. 14B illustrates the global analysis of TRG@ expression in cancerous tissues.

[0070] FIG. 14C shows the global analysis of TRG@ expression in cancer-free tissues.

[0071] FIG. 14D indicates the TMHMM profile of a human TRG@ polypeptide consisting of the amino acid sequence recited in SEC ID NO:29.

[0072] FIG. 15A demonstrates the e-northern result of TRPM4 expression in cancerous versus cancer-free tissues.

[0073] FIG. 15B illustrates the global analysis of TRPM4 expression in cancerous tissues.

[0074] FIG. 15C shows the global analysis of TRPM4 expression in cancer-free tissues.

[0075] FIG. 15D is the TMHMM profile of a human TRPM4 polypeptide consisting of the amino acid sequence recited in SEC ID NO:30.

### DETAILED DESCRIPTION OF THE INVENTION

[0076] The present invention provides compositions and methods for the diagnosis, treatment, and prevention of cancers. The present invention also provides methods for the identification or evaluation of anti-cancer drugs. Various aspects of the present invention are described in further detail in the following subsections. The use of subsections is not meant to limit the invention; subsections may apply to any aspect of the invention.

Cancer-Related Transmembrane Proteins (CRTPs) and Cancer-Related Transmembrane Protein Genes (CRTPGs)

[0077] Gene expression data in eight malignant tumor sample sets (i.e., breast, colon, esophagus, kidney, liver, lung, prostate, and stomach cancer sample sets) was compared to the corresponding normal counterparts in the Gene Logic BioExpress™ database. Fifteen CRTPGs were identified as showing higher average expression levels in specific tumor specimen(s) relative to the corresponding cancer-free tissue sample(s). The expression of each of these genes is increased by more than two-fold in at least one malignant tumor sample set as compared to the cancer-free counterpart, and the average expression level of the gene in the malignant sample set is greater than that in any of the eight cancer-free sample sets. The CRTPGs thus identified are depicted in Table 1a. Exemplary cDNA and amino acid sequences encoded by these genes are also provided.

TABLE 1a
Cancer-related transmembrane protein genes (CRTPGs)

| Gene Symbol | Locuslink. | cDNA Sequence | Amino Acid Sequence |
|---|---|---|---|
| ABCC4 | 10257 | SEQ ID NO: 1 | SEQ ID NO: 16 |
| C20orf103 | 24141 | SEQ ID NO: 2 | SEQ ID NO: 17 |
| CACNA1D | 776 | SEQ ID NO: 3 | SEQ ID NO: 18 |
| CDH6 | 1004 | SEQ ID NO: 4 | SEQ ID NO: 19 |
| CST | 9514 | SEQ ID NO: 5 | SEQ ID NO: 20 |
| ENPP3 | 5169 | SEQ ID NO: 6 | SEQ ID NO: 21 |
| FLJ11856 | 79581 | SEQ ID NO: 7 | SEQ ID NO: 22 |
| FOLH1 | 2346 | SEQ ID NO: 8 | SEQ ID NO: 23 |
| GPR54 | 84634 | SEQ ID NO: 9 | SEQ ID NO: 24 |
| HAVCR1 | 26762 | SEQ ID NO: 10 | SEQ ID NO: 25 |
| OR51E2 | 81285 | SEQ ID NO: 11 | SEQ ID NO: 26 |
| SLC6A3 | 6531 | SEQ ID NO: 12 | SEQ ID NO: 27 |
| SLC30A4 | 7782 | SEQ ID NO: 13 | SEQ ID NO: 28 |
| TRG@ | 6965 | SEQ ID NO: 14 | SEQ ID NO: 29 |
| TRPM4 | 54795 | SEQ ID NO: 15 | SEQ ID NO: 30 |

[0078] ABCC4 (ATP-binding cassette, sub-family C (CFTR/MRP), member 4) encodes a protein which is a member of the superfamily of ATP-binding cassette (ABC) transporters. ABC proteins transport various molecules across extra- and intra-cellular membranes. ABC genes are divided into seven distinct subfamilies (ABC1, MDR/TAP, MRP, ALD, OABP, GCN20, White). ABCC4 is a member of the MRP subfamily which is involved in multi-drug resistance. This protein is an apical organic anion transporter and may play a role in cellular detoxification as a pump for its substrate, organic anions. It is also a putative efflux pump for cAMP and cGMP in human kidney proximal tubules, and a common efflux system for both methotrexate and certain nucleotide analogues. It was reported that ABCC4 can mediate the export of glutathione (GSH). Depletion of intracellular GSH adversely affects the export of cAMP by ABCC4. Resistance to nucleoside analogues is also adversely affected by depletion of cellular GSH. It has been suggested that ABCC4 may play a physiological role in the transport of dehydroepiandrosterone-3-sulfate, conjugated steroids, and bile acids.

[0079] The expression levels of ABCC4 in various tumor and control tissue samples are depicted in FIGS. 1A-1C. The TMHMM profile of an ABCC4 protein is shown in FIG. 1D. As shown in FIG. 1A, the median expression level of ABCC4 in prostate cancer samples is at least 2.5 fold higher than that in the corresponding normal prostate samples. Hence, ABCC4 can be used as a diagnostic marker and drug target for prostate cancer.

[0080] C20orf103 (chromosome 20 open reading frame 103) is similar to S68401 (cattle) glucose induced gene. The protein encoded by the C20orf103 gene shares low similarity to a region of murine lysosome-associated membrane glycoprotein (Lamp1). The specific function of this protein has not yet been determined.

[0081] The expression levels of C20orf103 in tumor and control tissue samples are shown in FIGS. 2A-2C. The TMHMM profile of a C20orf103 protein is illustrated in FIG. 2D. The median expression levels of C20orf103 in breast cancer samples, esophageal cancer samples, and lung cancer samples are at least 4.5-, 48-, and 27-fold, respectively, higher than those in the corresponding normal tissue samples. Hence, C20orf103 can be a diagnostic marker and drug target for breast, esophageal, and lung cancers.

[0082] CACNA1D encodes calcium channel, voltage-dependent, L type, alpha 1D subunit. Voltage-dependent calcium channels (VDCCs) are multimeric complexes composed of a pore-forming alpha 1 subunit together with several accessory subunits, including alpha 2, delta, beta, and, in some cases, gamma subunits. A family of VDCCs known as the L-type channels are formed specifically from alpha(1S) (skeletal muscle), alpha(1C) (in heart and brain), alpha(1D) (mainly in brain, heart, and endocrine tissue), and alpha(1F) (retina). Neuroendocrine L-type currents have a significant role in the control of neurosecretion and can be inhibited by GTP-binding (G-) proteins.

[0083] In cultured rat dorsal root ganglion (DRG) neurons and guinea-pig cardiac myocytes, it was found that the amino acids 1417-1434 of the CACNA1D protein are exposed to the extracellular face of the membrane following depolarization and that the binding of an antibody to these amino acids attenuates calcium channel current.

[0084] CACNA1D expression is down-regulated in rat pheochromocytoma (PC12) cells following nerve growth factor treatment, but is up-regulated in the neuropil of the dentate gyrus molecular layer in epilepsy specimens and in cerebral cortical neurons after long term exposure to nicotine. Variations of the CACNA1D may also play a role in the pathogenesis of certain subsets of type 2 diabetes.

[0085] The expression levels of CACNA1D in tumor and control tissue samples are shown in FIGS. 3A-3C. The TMHMM profile of a CACNA1D protein is illustrated in FIG. 3D. The median expression level of CACNA1D in prostate cancer samples is at least 5.5-fold higher than that in its corresponding normal prostate samples. Thus, CACNA1D can be a diagnostic marker and drug target for prostate cancer. CACNA1D can also be a diagnostic marker and drug target for colon, liver, and esophagus cancers.

[0086] CDH6 (cadherin 6, type 2, K-cadherin (fetal kidney)) encodes a type II classical cadherin from the cadherin superfamily. The encoded membrane protein is a calcium dependent cell-cell adhesion glycoprotein comprised of five extracellular cadherin repeats, a transmembrane region and a highly conserved cytoplasmic tail. Cadherins mediate cell-cell binding in a homophilic manner, contributing to the sorting of heterogeneous cell types and the maintenance of orderly structures such as epithelium. Strong transcriptional expression of CDH has been observed in hepatocellular carcinoma, small cell lung carcinoma, and renal carcinoma cell lines, suggesting a possible role in metastasis and invasion. Mutational analysis also revealed homozygous deletions of CDH6 on 5p in the SK-LU-1 lung carcinoma cell line (Teng et al., Genomics 74:352-64, 2001).

[0087] The expression levels of CDH6 in tumor and control tissue samples are shown in FIGS. 4A-4C. The TMHMM profile of a CDH6 protein is illustrated in FIG. 4D. The median expression level of CDH6 in kidney cancer samples is at least 6.1-fold higher than that in its corresponding normal kidney samples. Thus, CDH6 can be a diagnostic marker and drug target for kidney cancer. CDH6 may also be a diagnostic marker and drug target for stomach cancer.

[0088] CST encodes cerebroside (3′-phosphoadenylylsulfate:galactosylceramide 3′) sulfotransferase. Sulfonation, an important step in the metabolism of many drugs, xenobiotics, hormones and neurotransmitters, is catalyzed by sulfotransferases. The CST cDNA encodes a 423-amino acid protein with a predicted type II transmembrane topology and 2 potential N-linked glycosylation sites; it is not homologous to either the cytosolic sulfotransferases or the Golgi sulfotransferases. Galactosylceramide sulfotransferase catalyzes the conversion of 3′-phosphoadenylylsulfate and galactosylceramide to adenosine 3′,5′-bisphosphate and galactosylceramide sulfate. CST activity is enhanced in renal cell carcinoma (RCC) by the action of epidermal growth factor, transforming growth factor, and hepatocyte growth factor. It has been suggested that the CST gene is generally over-expressed in human RCE cells via a signaling pathway involving protein kinase-C and tyrosine kinases (Honker et al., Cancer Res., 58:3800-5, 1998). The role of this enzyme in RCE, however, is currently unknown.

[0089] The expression levels of CST in tumor and control tissue samples are shown in FIGS. 5A-5C. The TMHMM profile of a CST protein is illustrated in FIG. 5D. The median expression level of CST in kidney and liver cancer samples is at least 5.1- and 3.2-fold, respectively, higher than those in their corresponding normal kidney and liver samples. Thus, CST can be a diagnostic marker and drug target for both types of cancers. CST may also be a diagnostic marker and drug target for lung and esophagus cancers.

[0090] ENPP3 encodes ectonucleotide pyrophosphatase/phosphodiesterase 3. The protein belongs to the family of nucleotide pyrophosphatases/phosphodiesterases (NPPs). NPPs release nucleoside 5′-monophosphates from nucleotides and their derivatives. They exist both as membrane proteins, with an extracellular active site, and as soluble proteins in body fluids. Well-characterized ENPPs include the mammalian ecto-enzymes ENPP1 (PC-1), ENPP2 (autotaxin) and ENPP3 (B10; gp130(RB13-6)). These are modular proteins including a short N-terminal intracellular domain, a single transmembrane domain, two somatomedin-B-like domains, a catalytic domain, and a C-terminal nuclease-like domain. The catalytic domain of ENPPs is conserved from prokaryotes to mammals and shows remarkable structural and catalytic similarities with the catalytic domain of other phospho-/sulfo-coordinating enzymes such as alkaline phosphatases. Hydrolysis of pyrophosphate/phosphodiester bonds by ENPPs occurs via a nucleotidylated threonine. ENPPs are also known to auto(de)phosphorylate this active-site threonine, a process accounted for by an intrinsic phosphatase activity, with the phosphorylated enzyme representing the catalytic intermediate of the phosphatase reaction. ENPP1, ENPP2, and ENPP3 have been implicated in various processes, including bone mineralization, signaling by insulin and by nucleotides, and the differentiation and motility of cells. While it has been established that most of these biological effects of ENPPs require a functional catalytic site, their physiological substrates remain to be identified.

[0091] Expression of the related rat ENPP3 mRNA has been found in a subset of immature glial cells and in the alimentary tract. The corresponding rat protein has been detected in the pancreas, small intestine, colon, and liver. Human ENPP3 mRNA is expressed in glioma cells, prostate, and uterus. Expression of the human protein has been detected in uterus, basophils, and mast cells.

[0092] The expression of ENPP3 in tumor and control tissue samples is shown in FIGS. 6A-6C. The TMHMM profile of an ENPP3 protein is illustrated in FIG. 6D. The median expression level of ENPP3 in kidney cancer samples is at least 23-fold higher than that in that the corresponding normal kidney samples. Thus, ENPP3 can be a diagnostic marker and drug target for kidney cancer. ENPP3 may also be a diagnostic marker and drug target for lung cancer.

[0093] FLJ11856 (putative G-protein coupled receptor GPCR41), GPR54 (G-protein-coupled receptor 54), and OR51E2 (olfactory receptor, family 51, subfamily E, member 2) all encode G-protein coupled receptors (GPCR). GPCRs, along with G-proteins and effectors (intracellular enzymes and channels which are modulated by G-proteins), are the components of a modular signaling system that connects the state of intracellular second messengers to extracellular inputs. The importance of GPCRs in the etiology of various diseases has been well established. GPCRs and GPCR genes are therefore potential targets for drug action and drug development.

[0094] The GPCR protein superfamily now contains over 250 types of paralogues, receptors that represent variants generated by gene duplications (or other processes), as opposed to orthologues, the same receptor from different species. The superfamily can be broken down into five families: Family I, receptors typified by rhodopsin and the beta2-adrenergic receptor and currently represented by over 200 unique members; Family II, the recently characterized parathyroid hormone/calcitonin/secretin receptor family; Family III, the metabotropic glutamate receptor family in mammals; Family IV, the cAMP receptor family, important in the chemotaxis and development of D. discoideum; and Family V, the fungal mating pheromone receptors such as STE2. GPCRs also include receptors for biogenic amines, for lipid mediators of inflammation, peptide hormones, and sensory signal mediators.

[0095] GPCR typically has seven transmembrane domains. GPCR becomes activated when the receptor binds its extracellular ligand. Conformational changes in the GPCR, which result from the ligand-receptor interaction, affect the binding affinity of a G protein to the GPCR intracellular domains. This enables GTP to bind with enhanced affinity to the G protein. Activation of the G protein by GTP leads to the interaction of the G protein a subunit with adenylate cyclase or other second messenger molecule generators. This interaction regulates the activity of adenylate cyclase and hence production of a second messenger molecule, cAMP. cAMP regulates phosphorylation and activation of other intracellular proteins. Alternatively, cellular levels of other second messenger molecules, such as cGMP or eicosinoids, may be upregulated or down-regulated by the activity of GPCRs. Activity of GPCR may also be regulated by phosphorylation of the infra- and extracellular domains or loops.

[0096] Among the CRTP genes disclosed in the present invention, FLJ11856 encodes a putative GPCR. The function of the protein encoded by FLJ11856 has not yet been determined. The expression of FLJ11856 in tumor and control tissue samples is shown in FIGS. 7A-7C. The TMHMM profile of a FLJ11856 protein is illustrated in FIG. 7D. The median expression levels of FLJ11856 in breast, esophageal, colon, liver, and lung cancer samples is at least 2.7-, 4.5-, 2.7-, 3.4-, and 7.2-fold, respectively, higher than those in the corresponding normal tissue samples. Thus, FLJ11856 can acts as a diagnostic marker and drug target for breast, esophageal, colon, liver, and lung cancers. FLJ11856 may also be a diagnostic marker and drug target for stomach cancer.

[0097] GPR54, cloned from a human brain cDNA library, encodes a human GPCR that exhibits 81% homology to the rat orphan receptor GPR54. Heterologous expression of human GPR54 in mammalian cells permitted the identification of three surrogate agonist peptides, all with a common C-terminal amidated motif. High potency agonism, indicative of a cognate ligand, was evident from peptides derived from the gene KiSS-1, the expression of which prevents metastasis in melanoma cells. The highest levels of expression of human GPR54 mRNA were observed in brain, pituitary gland, and placenta. The highest levels of KiSS-1 gene expression were observed in placenta and brain. A polyclonal antibody raised to the C terminus of the human GPR54 showed binding to neurons in the cerebellum, cerebral cortex, and brainstem.

[0098] The expression of GPR54 in tumor and control tissue samples is shown in FIGS. 9A-9C. The TMHMM profile of a GPR54 protein is illustrated in FIG. 9D. The median expression levels of GPR54 in kidney and lung cancer samples is at least 12- and 9-fold, respectively, higher than those in the corresponding normal tissue samples. Thus, GPR54 can be a diagnostic marker and drug target for kidney and lung cancers. GPR54 can also be a diagnostic marker and drug target for breast cancer.

[0099] OR51E2 encodes a human prostate specific G-protein coupled receptor with properties characteristic of an olfactory receptor. A partial cDNA sequence of this gene, called PSGR, was recently cloned. The gene contains two exons and one intron of 14.9 kb in its 5′ untranslated region, and was mapped to human chromosome 11p15.2. A cluster of transcription initiation sites for the 2.8 kb PSGR mRNA was identified. Cloning of the homologous gene from the mouse revealed 93% amino acid homology between the human and mouse or rat (previously cloned as RA1c) proteins, and 99% identity between the rat and mouse homologs. Although northern analysis indicated expression of the human PSGR homolog was prostate specific, its mRNA could also be detected in the olfactory zone and the medulla oblongata of the human brain. In the mouse, the PSGR gene is predominantly expressed in the brain and colon. In the rat, the PSGR homolog is expressed in the liver in addition to the brain. These data add to the growing body of evidence suggesting that olfactory receptors may have functional roles in tissues other than the olfactory organ, a further, suggest that these functions may vary across species.

[0100] A study using multiple tissue Northern blots from over 50 different tissues revealed that OR51E2 expression was restricted to human prostate tissues. The differential expression of OR51E2 between normal and tumor tissues was highly significant (P<0.001), and 32 of 52 (62%) matched prostate specimens exhibited tumor-associated overexpression of OR51E2. There was very little or no expression of OR51E2 in many normal specimens in comparison with the generally high expression of OR51E2 seen in matched tumor specimens. In situ hybridization assays showed restricted OR51E2 expression in the epithelial cells of the normal and tumor tissue sections. See Xu et al., Cancer Res., 60:6568-72, 2000.

[0101] The expression of OR51E2 in tumor and control tissue samples is shown in FIGS. 11A-11C. The TMHMM profile of an OR51E2 protein is illustrated in FIG. 1D. The median expression level of OR15E2 in prostate cancer samples is at least 3.9-fold higher than that in the corresponding normal tissue samples. Thus, OR15E2 may acts as a diagnostic marker and drug target for prostate cancer.

[0102] FOLH1 (folate hydrolase 1), also known as prostate-specific membrane antigen 1, encodes an N-acetylated, α-linked acidic dipeptidase which also hydrolyzes folate. FOLH1 is a 750-amino acid type II membrane glycoprotein, which is primarily expressed in normal human prostate epithelium. Expression of FOLH1 is upregulated as prostate tumor grade increases and is found in the vasculature of many tumors, with no or less presence in benign tissues.

[0103] cDNA microarray screening of gene expression patterns in benign prostatic hyperplasia BPH and tumor samples indicated that FOLH1 was significantly over-expressed in prostate cancer compared to BPH. Prostate epithelial cells stained positively for FOLH1 in prostate cancer tissues, whereas the majority of BPH tissues showed negative staining. (Burger et al., Int. J. Cancer, 100:228-37, 2002).

[0104] The expression of FOLH1 in tumor and control tissue samples is shown in FIGS. 8A-8C. The TMHMM profile of a FOLH1 protein is illustrated in FIG. 8D. The median expression level of FOLH1 in prostate cancer samples is about 3.4-fold higher than that in the corresponding normal prostate tissue samples. Thus, FOLH1 can be a diagnostic marker and drug target for prostate cancer.

[0105] HAVCR1 encodes hepatitis A virus cellular receptor 1. The protein is approximately 79% identical to mouse HAVCR1, which was identified as a receptor for the hepatitis A virus. The six Cys residues of the extracellular domain and the first N-glycosylation site of mouse HAVCR1 are conserved in human HAVCR1. However, the number of hexameric repeats of the mucin-like region is reduced from 27 in mouse HAVCR1 to 13 in human HAVCR1. HAVCR1 is expressed in liver, small intestine, colon, and spleen, and is expressed at higher levels in the kidney and testis. Antibody protection experiment suggests that HAVCR1 is a functional receptor for hepatitis A virus in humans.

[0106] The HAVCR1 protein contains an immunoglobulin (Ig) domain and is moderately similar to rat kidney injury molecule-1 (KIM-1). Structurally, KIM-1 is a member of the immunoglobulin gene superfamily most reminiscent of mucosal addressin cell adhesion molecule 1 (MAdCAM-1). It was reported that HAVCR1 mRNA and protein are expressed at a low level in normal kidney but are increased dramatically in post-ischemic kidney. In situ hybridization and immunohistochemistry revealed that HAVCR1 is expressed in proliferating bromodeoxyuridine-positive and dedifferentiated vimentin-positive epithelial cells in regenerating proximal tubules. HAVCR1 may play an important role in the restoration of the morphological integrity and function to post-ischemic kidney.

[0107] The expression of HAVCR1 in tumor and control tissue samples is shown in FIGS. 10A-10C. The TMHMM profile of a HAVCR1 protein is illustrated in FIG. 10D. The median expression level of HAVCR1 in kidney cancer samples is about 3.7-fold higher than that in the corresponding normal kidney tissue samples. Therefore, HAVCR1 can be a diagnostic marker and drug target for kidney cancer.

[0108] SLC6A3 (solute carrier family 6 (neurotransmitter transporter, dopamine), member 3) encodes a dopamine transporter 3 which is strongly similar to murine Dat1. Dopamine transporter is responsible for presynaptic reuptake of dopamine and is a major site of action of psychostimulant drugs, including cocaine. The protein's actions and its specific localization to dopaminergic neurons make it a candidate gene for several psychiatric illnesses. SLC6A3 has been mapped to distal chromosome 5p. Alleles at this locus have been reported to be associated with cocaine-induced paranoia and attention deficit disorder.

[0109] The SLC6A3 gene has also been linked to smoking initiation and nicotine dependence, to obesity in African-American smokers, and to the occurrence of posttraumatic stress disorder (PTSD) among trauma survivors. The SLC6A3 gene, however, has not yet been linked to cancer.

[0110] The expression of SLC6A3 in tumor and control tissue samples is shown in FIGS. 12A-12C. The TMHMM profile of a SLC6A3 protein is illustrated in FIG. 12D. The median expression level of SLC6A3 in kidney cancer samples is about 4.8-fold higher than that in the corresponding normal kidney tissue samples. Thus, SLC6A3 can be a diagnostic marker and drug target for kidney cancer.

[0111] SLC30A4 (solute carrier family 30 (zinc transporter), member 4) encodes the fourth and last identified member of a mammalian proteins family presumably involved in the cellular transport of zinc. Zinc is an essential trace element required by many living organisms. An adequate supply of zinc is particularly important in the neonatal period. Zinc is a significant component of breast milk, which is transported across the maternal epithelia during lactation. The mechanisms by which zinc becomes a constituent of breast milk have not been elucidated. The function of the zinc transporter ZnT4 in the transport of zinc into milk during lactation was previously demonstrated by studies of a mouse mutant, the ‘lethal milk’ mouse, where a mutation in the ZnT4 gene decreased the transport of zinc into milk.

[0112] The SLC30A4 gene is the human homologue of murine ZnT4 gene. There is strong homology between the mouse ZnT4 and human SLC30A4 coding sequences. The SLC30A4 gene is constitutively expressed in the human breast and may be one of the several members of the ZnT family involved in the transport of zinc into milk.

[0113] Kidneys also play a key role in zinc balance. The portion of Zn²⁺ that enters the glomerular filtrate is efficiently reabsorbed along the nephron through a mechanism yet to be identified. SLC30A4 gene expression was detected in adult rat kidney. The gene has not yet been associated with cancer.

[0114] The expression of SLC30A4 in tumor and control tissue samples is shown in FIGS. 13A-13C. The TMHMM profile of a SLC30A4 protein is illustrated in FIG. 13D. SLC30A4 can be a diagnostic marker and drug target for prostate cancer.

[0115] TRG@ (T cell receptor gamma locus) encodes the gamma chain of a T cell receptor. T cell receptors recognize foreign antigens which have been processed as small peptides and bound to major histocompatibility complex (MHC) molecules at the surface of antigen presenting cells (APC). Each T cell receptor is a dimer consisting of one alpha and one beta chain or one delta and one gamma chain. In a single cell, the T cell receptor loci are rearranged and expressed in the order delta, gamma, beta, and alpha. If both delta and gamma rearrangements produce functional chains, the cell expresses delta and gamma. If not, the cell proceeds to rearrange the beta and alpha loci. The TRG@ region represents the germline organization of the T cell receptor gamma locus. The gamma locus includes V (variable), J (oining), and C (constant) segments. During T cell development, the gamma chain is synthesized by a recombination event at the DNA level joining a V segment with a J segment; the C segment is later joined by splicing at the RNA level. Recombination of many different V segments with several J segments provides a wide range of antigen recognition. Additional diversity is attained by junctional diversity, resulting from the random additional of nucleotides by terminal deoxynucleotidyltransferase. Several V segments of the gamma locus are known to be incapable of encoding a protein and are considered pseudogenes. Somatic rearrangement of the gamma locus has been observed in T cells derived from patients with T cell leukemia and ataxia telangiectasia. The polymorphism of the TCR-gamma complex may also be involved in the pathogenesis of colorectal cancer (Uthoff et al., Ann. Surg. Oncol., 9:88-93, 2002).

[0116] The expression of TRG@ in tumor and control tissue samples is shown in FIGS. 14A-14C. The TMHMM profile of a TRG@ protein is illustrated in FIG. 14D. The median expression level of TRG@ in prostate cancer samples is about 3-fold higher than that in the corresponding normal prostate tissue samples. Hence, TRG@ can be a diagnostic marker and drug target for prostate cancer.

[0117] TRPM4 (transient receptor potential cation channel, subfamily M, member 4) encodes a protein which belongs to the transient receptor potential (TRP) superfamily. The superfamily includes a group of subfamilies of channel-like proteins mediating a multitude of physiological signaling processes. The TRP-melastatin (TRPM) subfamily includes the putative tumor suppressor melastatin (MLSN) and is a poorly characterized group of TRP-related proteins. TRPM4 and MLSN each mediate Ca²⁺ entry when expressed in HEK293 cells.

[0118] Recently, a second form of TRPM4, TRPM4b, was cloned and characterized. TRPM4b encodes a cation channel of 25 pS unitary conductance that is directly activated by [Ca²⁺] with an apparent K(D) of approximately 400 nM. TRPM4b is activated following receptor-mediated Ca²⁺ mobilization, representing a regulatory mechanism that controls the magnitude of Ca²⁺ influx by modulating the membrane potential and, with it, the driving force for Ca²⁺ entry through other Ca²⁺-permeable pathways.

[0119] The expression of TRPM4 in tumor and control tissue samples is shown in FIGS. 15A-15C. The TMHMM profile of a TRPM4 protein is illustrated in FIG. 15D. The median expression level of TRPM4 in prostate cancer samples is about 4-fold higher than that in the corresponding normal prostate tissue samples. Therefore, TRPM4 can be a diagnostic marker and drug target for prostate cancer.

[0120] Table 1b summarizes each cancer and the CRTPGs that can be used for the diagnosis and treatment of that cancer.

TABLE 1b
CRTPGs for Diagnosis and Treatment of Cancers

| Cancer Type | Corresponding CRTPGs |
|---|---|
| prostate cancer | ABCC4, CACNA1D, OR51E2, TRG@, TRPM4, |
| | SLC30A4, and FOLH1 |
| kidney cancer | SLC30A4, CDH6, ENPP3, CST, GRP54, and HAVCR1 |
| breast cancer | FLJ11856, C20orf103, CACNA1D, and GPR54 |
| esophageal | FLJ11856, C20orf103, CACNA1D, and CST |
| cancer | |
| liver cancer | FLJ11856, CACNA1D, and CST |
| colon cancer | CACNA1D and FLJ11856 |
| lung cancer | FLJ11856, GPR54, C20orf103, CST, and ENPP3 |
| stomach cancer | CDH6 and FLJ11856 |

CRTPGs as Targets of Cancer Therapy and Markers for Cancers

[0121] The present invention provides methods of using CRTPGs or their expression products for detecting, monitoring, evaluating, or treating cancers. In one embodiment, cancer cells are targeted with anti-CRTP antibodies that are capable of inducing antibody-dependent cellular cytotoxicity (ADCC) or sensitizing the tumor cells to a cytotoxic factor such as TNFa. In one example, the anti-CRTP antibodies are conjugated to a toxic drug moiety, such as calicheamicin and esperamicin or a radiation source. In many embodiments, the anti-CRTP antibodies are monoclonal or humanized antibodies.

[0122] In another embodiment, a humoral immune response is induced against cancer cells in a patient of interest. A humoral immune response can be elicited by using a vaccine comprising a CRTP or a fragment thereof or an expression vector encoding the same.

[0123] In yet another embodiment, a modulator of the expression or protein activity of a CRTPG is administered to a patient in need thereof. Without being limited to any particular mechanism, the invention is based in part on the principle that modulation of the expression or protein activities of CRTPGs can ameliorate cancer when the expression levels or activities of these genes are returned to or substantially returned to normal (non-diseased) levels. The modulation of CRTPGs can be achieved at the protein level, for example, by inhibiting the activity of a CRTP with an antibody, an antagonist, or a dominant negative mutant. The modulation of CRTPGs can also be achieved at the transcriptional level, for example, by inhibiting the expression of a CRTPG with an antisense nucleic acid, an RNAi sequence, or an inhibitor to the CRTPG promoter or other regulatory sequences.

[0124] The present invention also features the use of CRTPGs or their expression products as cancer markers. In one embodiment, CRTPGs are used to detect, monitor or evaluate the presence, progression, prognosis, or clinical outcome of cancer. In another embodiment, CRTPGs are used to assess the efficacy of a treatment of cancer. In many embodiments, relative expression levels of CRTPGs are indicative of the severity of cancer.

[0125] The present invention further features methods of using CRTPGs to screen for anti-cancer compounds. In one embodiment, the compounds thus identified can convert an expression profile that indicates a poor prognosis to one that is predictive of a better prognosis.

[0126] The CRTPG products can be isolated from respective body fluids, tissues or cells. The CRTPG products can also be prepared by using recombinant DNA or chemical synthesis techniques, as appreciated by those skilled in the art.

Isolated Polynucleotides

[0127] Many polynucleotides employed in the present invention comprise sequences which are substantially identical or complementary to the CRTPNs listed in Table 1a. A sequence is substantially complementary to another sequence if the two sequences can hybridize to each other under highly stringent conditions.

[0128] Examples of conditions of different hybridization stringency are listed in Table 2. Highly stringent conditions are those that are at least as stringent as conditions A-F; stringent conditions are at least as stringent as conditions G-L; and reduced stringency conditions are at least as stringent as conditions M-R. As used in Table 2, hybridization is carried out under a given hybridization condition for about 2 hours, followed by two 15-minute washes under the corresponding washing condition(s).

TABLE 2
Stringency Conditions

| Stringency | Polynucleotide | Hybrid | Hybridization | Wash Temp. |
|---|---|---|---|---|
| Condition | Hybrid | Length (bp)¹ | Temperature and Buffer^{H} | and Buffer^{H} |
| A | DNA:DNA | >50 | 65° C.; 1xSSC -or- | 65° C.; 0.3xSSC |
| | | | 42° C.; 1xSSC, 50% formamide | |
| B | DNA:DNA | <50 | TB*; 1xSSC | TB*; 1xSSC |
| C | DNA:RNA | >50 | 67° C.; 1xSSC -or- | 67° C.; 0.3xSSC |
| | | | 45° C.; 1xSSC, 50% formamide | |
| D | DNA:RNA | <50 | TD*; 1xSSC | TD*; 1xSSC |
| E | RNA:RNA | >50 | 70° C.; 1xSSC -or- | 70° C.; 0.3xSSC |
| | | | 50° C.; 1xSSC, 50% formamide | |
| F | RNA:RNA | <50 | TF*; 1xSSC | TF*; 1xSSC |
| G | DNA:DNA | >50 | 65° C.; 4xSSC -or- | 65° C.; 1xSSC |
| | | | 42° C.; 4xSSC, 50% formamide | |
| H | DNA:DNA | <50 | TH*; 4xSSC | TH*; 4xSSC |
| I | DNA:RNA | >50 | 67° C.; 4xSSC -or- | 67° C.; 1xSSC |
| | | | 45° C.; 4xSSC, 50% formamide | |
| J | DNA:RNA | <50 | TJ*; 4xSSC | TJ*; 4xSSC |
| K | RNA:RNA | >50 | 70° C.; 4xSSC -or- | 67° C.; 1xSSC |
| | | | 50° C.; 4xSSC, 50% formamide | |
| L | RNA:RNA | <50 | TL*; 2xSSC | TL*; 2xSSC |
| M | DNA:DNA | >50 | 50° C.; 4xSSC -or- | 50° C.; 2xSSC |
| | | | 40° C.; 6xSSC, 50% formamide | |
| N | DNA:DNA | <50 | TN*; 6xSSC | TN*; 6xSSC |
| O | DNA:RNA | >50 | 55° C.; 4xSSC -or- | 55° C.; 2xSSC |
| | | | 42° C.; 6xSSC, 50% formamide | |
| P | DNA:RNA | <50 | TP*; 6xSSC | TP*; 6xSSC |
| Q | RNA:RNA | >50 | 60° C.; 4xSSC -or- | 60° C.; 2xSSC |
| | | | 45° C.; 6xSSC, 50% formamide | |
| R | RNA:RNA | <50 | TR*; 4xSSC | TR*; 4xSSC |
| ¹The hybrid length is that anticipated for the hybridized region(s) of the hybridizing polynucleotides. When hybridizing a polynucleotide to a target polynucleotide of unknown sequence, the hybrid length is assumed to be that of the hybridizing polynucleotide. When polynucleotides of known sequence are hybridized, the hybrid length can be determined by aligning the sequences of the polynucleotides | | | | |
| # and identifying the region or regions of optimal sequence complementarity. | | | | |
| ^{H}SSPE (1xSSPE is 0.15M NaCl, 10 mM NaH2PO4, and 1.25 mM EDTA, pH 7.4) can be substituted for SSC (1xSSC is 0.15M NaCl and 15 mM sodium citrate) in the hybridization and wash buffers. | | | | |
| TB* - TR*: The hybridization temperature for hybrids anticipated to be less than 50 base pairs in length should be 5-10° C. less than the melting temperature (Tm) of the hybrid, where Tm is determined according to the following equations. For hybrids less than 18 base pairs in length, Tm(° C.) = 2(# of A + T bases) + 4(# of G + C bases). For hybrids between 18 and 49 base pairs in | | | | |
| # length, Tm(° C.) = 81.5 + 16.6(log₁₀Na⁺) + 0.41(% G + C) − (600/N), where N is the number of bases in the hybrid, and Na⁺ is the molar concentration of sodium ions in the hybridization buffer (Na⁺ for 1xSSC = 0.165M). | | | | |

[0129] Many polynucleotides of the inventon can be used as probes or primers. A probe/primer typically comprises a substantially purified polynucleotide. In many embodiments, a probe/primer includes at least about 15, 25, 50, 75, 100, 125, 150, 175, 200, 225, 250, 275, 300, 325, 350, 400 or more consecutive nucleotides, and can hybridize under stringent conditions to of a CRTPG or CRTPN, or the complement thereof. As used herein, a polynucleotide can gybridize to a gene if the polynucleotide can hybridize ti an RNA transcript, or the complement thereof, of the gene. In many embodimetns, probes for a given gene do not hybridize to other genes under stringent conditions.

[0130] In one embodiment, the probes employed in the present invention comprise label groups. Suitable label groups include, but are not limited to, radioisotopes, fluorescent compounds, enzymes, or enzyme co-factors. The probes can also be labeled indirectly. The probes of the present invention can be used as part of a diagnostic kit for identifying cells or tissues in which a CRTPG is over- or under-expressed. The probes can also be used to detect the number of genomic copies of a CRTPG in a patient of interest.

[0131] The invention further features polynucleotide variants. The polynucleotide variants of the present invention include polynucleotide molecules differing from the polynucleotide sequences of the CRTPGs listed in Table 1a due to degeneracy of the genetic code but encoding the same proteins encoded by CRTPGs shown in Table 1a. The polynucleotide variants of the present invention also include CRTPG homologs of other species. In addition, the polynucleotide variants of the present invention include polynucleotide molecules which are structurally different from the CRTPNs (e.g., having a slight altered sequence), but which have substantially the same properties as the CRTPNs (e.g., encoding similar amino acid sequences that are changed only at non-essential amino acid residues). Such polynucleotides may differ from the original polynucleotide by one or more substitutions, additions, and/or deletions. For instance, a variant of a polynucleotide can have 1, 2, 5, 10, 15, 20, 25 or more nucleotide substitutions, additions or deletions, but still encodes a polypeptide having substantially the same function as the polypeptide encoded by the original polynucleotide. In many cases, the modification(s) is in-frame, i.e., the modified polynucleotide can be transcribed and translated to the original or intended stop codon. If the original polynucleotide encodes a polypeptide with a biological activity, the polypeptide encoded by a variant of the original polynucleotide substantially retains such activity. In one embodiment, the biological activity of a variant is reduced or enhanced by no more than 50%, 40%, 30%, 20%, 10% or 5% relative to the original activity. Examples of polynucleotide variants include allelic variants.

[0132] Furthermore, the polynucleotide variants of the present invention include polynucleotide molecules that are capable of hybridizing under stringent or highly stringent conditions to a CRTPN or CRTPG, or the complement thereof. These polynucleotide molecules can include at least 15, 20, 25, 30, 50, 100, 150, 200, 250, 300, 350, 400, 450, 500, 550, 600, 650, 700, 750, 800, 850, 900, 950, 1000, 1100, 1200, 1300, 1400, 1500, 1600, 1700, 1800, 1900, 2000 or more nucleotides.

[0133] In addition to the nucleotide sequences of the CRTPGs listed in Table 1a, it will be appreciated by those skilled in the art that DNA sequence polymorphisms leading to changes in the amino acid sequences of the proteins encoded by the CRTPGs listed in Table 1a may exist within a population (e.g., the human population). These polymorphic DNA sequences are contemplated by the present invention. Such genetic polymorphism in the CRTPGs listed in Table 1a may exist among individuals within a population due to natural allelic variation. In addition, it will be appreciated that DNA polymorphisms that affect RNA expression levels can also exist and may affect the overall expression level of that gene (e.g., by affecting regulation or degradation).

[0134] Polynucleotide molecules corresponding to natural allelic variants and homologs of the CRTPGs can be isolated based on their homology to the CRTPGs listed in Table 1a using standard recombinant DNA technology. Polynucleotide molecules corresponding to natural allelic variants and homologs of the CRTPGs of the invention can also be isolated by mapping to the same chromosome or locus as the CRTPGs of the invention.

[0135] A polynucleotide may be further modified to increase stability in vivo. Possible modifications include, but are not limited to, the addition of flanking sequences at the 5′ and/or 3′ ends; the use of phosphorothioate or 2-o-methyl rather than phosphodiester linkages in the backbone; and the inclusion of nontraditional bases such as inosine, queosine and wybutosine, as well as acetyl- methyl-, thio- and other modified forms of adenine, cytidine, guanine, thymine and uridine.

[0136] Another aspect of the invention pertains to isolated polynucleotide molecules that are antisense to the CRTPGs of the invention. An “antisense” polynucleotide comprises a nucleotide sequence which is complementary to a “sense” polynucleotide, e.g., complementary to the coding strand of a double-stranded cDNA molecule or to an mRNA sequence. An antisense polynucleotide can be complementary to the entire coding strand of a CRTPG, or a portion thereof. An antisense polynucleotide molecule can also be complementary to a noncoding region of the coding strand of a CRTPG or CRTPN.

[0137] In many embodiments, an antisense polynucleotide of the present invention includes at least about 10, 15, 20, 25, 30, 35, 40, 45, 50 or more nucleotides. An antisense polynucleotide can be designed according to the rules of Watson and Crick base pairing. In one embodiment, an antisense polynucleotide is chemically synthesized using naturally occurring nucleotides or variously modified nucleotides designed to increase the biological stability of the molecules or to increase the physical stability of the duplex formed between the antisense and sense polynucleotides. Examples of modified nucleotides which can be used to generate an antisense polynucleotide include 5-fluorouracil, 5-bromouracil, 5-chlorouracil, 5-iodouracil, hypoxanthine, xanthine, 4-acetylcytosine, 5-(carboxyhydroxymethyl) uracil, 5-carboxymethylaminomethyl-2-thiouridine, 5-carboxymethylaminomethyluracil, dihydrouracil, beta-D-galactosylqueosine, inosine, N6-isopentenyladenine, 1-methylguanine, 1-methylinosine, 2,2-dimethylguanine, 2-methyladenine, 2-methylguanine, 3-methylcytosine, 5-methylcytosine, N6-adenine, 7-methylguanine, 5-methylaminomethyluracil, 5-methoxyaminomethyl-2-thiouracil, beta-D-mannosylqueosine, 5′-methoxycarboxymethyluracil, 5-methoxyuracil, 2-methylthio-N6-isopentenyladen4exine, unacil-5-oxyacetic acid (v), wybutoxosine, pseudouracil, queosine, 2-thiocytosine, 5-methyl-2-thiouracil, 2-thiouracil, 4-thiouracil, 5-methyluracil, uracil-5-oxyacetic acid methylester, 3-(3-amino-3-N-2-carboxypropyl) uracil, (acp3)w, and 2,6-diaminopurine. In another embodiment, an antisense polynucleotide of the present invention is produced biologically by using an expression vector into which the target sequence is subcloned in an antisense orientation.

[0138] In many cases, the antisense polynucleotide molecules of the invention are administered to a subject or generated in situ such that they hybridize or bind to cellular mRNA and/or genomic DNA encoding a CRTP, thereby inhibiting the expression of the corresponding CRTPG. An exemplary route of administration of antisense polynucleotide molecules is direct injection at a tissue site (e.g., intestine). In one embodiment, antisense polynucleotide molecules are modified to target selected cells and then administered systemically. For systemic administration, antisense molecules can be modified such that they specifically bind to receptors or antigens expressed on a selected cell surface, e.g., by linking the antisense polynucleotide molecules to peptides or antibodies which bind to cell surface receptors or antigens. The antisense polynucleotide molecules can also be delivered to cells using the vectors described herein. To achieve sufficient intracellular concentrations of the antisense molecules, vector constructs in which the antisense polynucleotide molecule is placed under the control of a strong promoter, such as pol II or pol III promoter, may be employed.

[0139] In yet another embodiment, an antisense polynucleotide molecule of the invention is an α-anomeric polynucleotide molecule. An α-anomeric polynucleotide molecule forms specific double-stranded hybrids with complementary RNA in which, contrary to the usual β-units, the strands run parallel to each other (Gaultier et al., Polynucleotides. Res., 15:6625-6641, 1987). The antisense polynucleotide molecule can also comprise a 2′-o-methylribonucleotide or a chimeric RNA-DNA analogue.

[0140] In still another embodiment, an antisense polynucleotide of the invention is a ribozyme. Ribozymes are catalytic RNA molecules with ribonuclease activity which are capable of cleaving a single-stranded polynucleotide, such as an mRNA, to which they have a complementary region. Thus, ribozymes (e.g., hammerhead ribozymes) can be used to catalytically cleave mRNA transcripts of the CRTPGs to thereby inhibit translation of said mRNA. A ribozyme having specificity for a CRTPN can be designed based upon the nucleotide sequence of a gene of the invention, disclosed herein. For example, a derivative of a Tetrahymena L-19 IVS RNA can be constructed in which the nucleotide sequence of the active site is complementary to the nucleotide sequence to be cleaved in a CRTPG protein-encoding mRNA. Alternatively, mRNA transcribed from a gene of the invention can be used to select a catalytic RNA having a specific ribonuclease activity from a pool of RNA molecules. Alternatively, expression of a CRTPG of the invention can be inhibited by targeting the regulatory region of these genes (e.g., the promoter and/or enhancers) with complementary nucleotide sequences that will form triple helical structures with the target sequence to prevent transcription of the gene in target cells.

[0141] Expression of the CRTPGs of the invention can also be inhibited by using RNA interference (“RNAᵢ”). Sequences capable of inhibiting gene expression by RNA interference can have any desired length. For instance, the sequence can have at least 15, 20, 25, or more consecutive nucleotides. The sequence can be dsRNA or any other type of polynucleotide, provided that the sequence can form a functional silencing complex to degrade the target mRNA transcript.

[0142] In one embodiment, the sequence comprises or consists of a short interfering RNA (siRNA). The siRNA can be, without limitation, dsRNA having 19-25 nucleotides. siRNAs can be produced endogenously by degradation of longer dsRNA molecules by an RNase III-related nuclease called Dicer. siRNAs can also be introduced into a cell exogenously or by transcription of an expression construct. Once formed, the siRNAs assemble with protein components into endoribonuclease-containing complexes known as RNA-induced silencing complexes (RISCs). An ATP-generated unwinding of the siRNA activates the RISCs, which in turn target the complementary mRNA transcript by Watson-Crick base-pairing, thereby cleaving and destroying the mRNA. Cleavage of the mRNA may take place near the middle of the region bound by the siRNA strand. This sequence-specific mRNA degradation results in gene silencing.

[0143] At least two ways can be employed to achieve siRNA-mediated gene silencing. First, siRNAs can be synthesized in vitro and introduced into cells to transiently suppress gene expression. Synthetic siRNA provides an easy and efficient way to achieve RNAi. siRNA are duplexes of short mixed oligonucleotides which can include, for example, 19 nucleotides with symmetric dinucleotide 3′ overhangs. Using synthetic 21 bp siRNA duplexes (e.g., 19 RNA bases followed by a UU or dTdT 3′ overhang), sequence-specific gene silencing can be achieved in mammalian cells. These siRNAs can specifically suppress targeted gene translation in mammalian cells without activation of DNA-dependent protein kinase (PKR) by longer dsRNA, which may result in non-specific repression of translation of many proteins.

[0144] Second, siRNAs can be expressed in vivo from vectors. This approach can be used to stably express siRNAs in cells or transgenic animals. In one embodiment, siRNA expression vectors are engineered to drive siRNA transcription from polymerase III (pol III) transcription units. Pol III transcription units are suitable for hairpin siRNA expression, since they deploy a short AT rich transcription termination site that leads to the addition of 2 bp overhangs (e.g., UU) to hairpin siRNAs—a feature that is helpful for siRNA function. The Pol III expression vectors can also be used to create transgenic mice that express siRNA.

[0145] In another embodiment, siRNAs can be expressed in a tissue-specific manner. Under this approach, long double-stranded RNAs (dsRNAs) are first expressed from a promoter (such as CMV (pol II)) in the nuclei of selected cell lines or transgenic mice. The long dsRNAs are processed into siRNAs in the nuclei (e.g., by Dicer). The siRNAs exit from the nuclei and mediate gene-specific silencing. A similar approach can be used in conjunction with tissue-specific promoters to create tissue-specific knockdown mice.

[0146] Any 3′ dinucleotide overhang, such as UU, can be used for siRNA design. In some cases, G residues in the overhang are avoided because of the potential for the siRNA to be cleaved by RNase at single-stranded G residues.

[0147] With regard to the siRNA sequence itself, it has been found that siRNAs with 30-50% GC content can be more active than those with a higher G/C content in certain cases. Moreover, since a 4-6 nucleotide poly(T) tract may act as a termination signal for RNA pol III, stretches of >4 Ts or As in the target sequence may be avoided in certain cases when designing sequences to be expressed from an RNA pol III promoter. In addition, some regions of mRNA may be either highly structured or bound by regulatory proteins. Thus, it may be helpful to select siRNA target sites at different positions along the length of the gene sequence. Finally, the potential target sites can be compared to the appropriate genome database (human, mouse, rat, etc.). Any target sequences with more than 16-17 contiguous base pairs of homology to other coding sequences may be eliminated from consideration in certain cases.

[0148] In one embodiment, siRNA is designed to have two inverted repeats separated by a short spacer sequence. In some examples, the siRNA end with a string of Ts that serve as a transcription termination site. This design produces an RNA transcript that is predicted to fold into a short hairpin siRNA. The selection of siRNA target sequence, the length of the inverted repeats that encode the stem of a putative hairpin, the order of the inverted repeats, the length and composition of the spacer sequence that encodes the loop of the hairpin, and the presence or absence of 5′-overhangs, can vary to achieve desirable results.

[0149] The siRNA targets can be selected by scanning an mRNA sequence for AA dinucleotides and recording the 19 nucleotides immediately downstream of the AA. Other methods can also been used to select the siRNA targets. In one example, the selection of the siRNA target sequence is purely empirically determined (see e.g., Sui et al, Proc. Natl. Acad. Sci. USA 99: 5515-5520, 2002), as long as the target sequence starts with GG and does not share significant sequence homology with other genes as analyzed by BLAST search. In another example, a more elaborate method is employed to select the siRNA target sequences. This procedure exploits an observation that any accessible site in endogenous mRNA can be targeted for degradation by synthetic oligodeoxyribonucleotide/RNase H method (Lee et al, Nature Biotechnology 20:500-505, 2002).

[0150] In another embodiment, the hairpin siRNA expression cassette is constructed to contain the sense strand of the target, followed by a short spacer, the antisense strand of the target, and 5-6 Ts as transcription terminator. The order of the sense and antisense strands within the siRNA expression constructs can be altered without affecting the gene silencing activities of the hairpin siRNA. In certain instances, the reversal of the order may cause partial reduction in gene silencing activities.

[0151] The length of nucleotide sequence being used as the stem of siRNA expression cassette can range, for instance, from 19 to 29. The loop size can range from 3 to 23 nucleotides. Other lengths and/or loop sizes can also be used.

[0152] In yet another embodiment, a 5′ overhang in the hairpin siRNA construct can be used, provided that the hairpin siRNA is functional in gene silencing. In one example, the 5′ overhang includes about 6 nucleotide residues.

[0153] In still yet another embodiment, the target sequences for RNAi are 21-mer or 20-mer sequence fragments selected from CRTPG coding sequences, such as SEQ ID NOS:1-15. The target sequences can be selected from either ORF regions or non-ORF regions. The 5′ end of each target sequence has dinucleotide “NA,” where “N” can be any base and “A” represents adenine. The remaining 19-mer or 18-mer sequence has a GC content of between 30% and 65%. In many examples, the remaining 19-mer or 18-mer sequence does not include any four consecutive A or T (i.e., AAAA or TTTT), three consecutive G or C (i.e., GGG or CCC), or seven “GC” in a row. Examples of the target sequences prepared using the above-described criteria (“Relaxed Criteria”) are illustrated in Table 3. Each target sequence in Table 3 has SEQ ID NO:3n+1, and the corresponding siRNA sense and antisense strands have SEQ ID NO:3n+2 and SEQ ID NO:3n+3, respectively, where n is a positive integer. For each CRTPG coding sequence (SEQ ID NOS:1-15), multiple target sequences can be selected.

[0154] Additional criteria can be used for RNAi target sequence design. In one example, the GC content of the remaining 19-mer or 18-mer sequence is limited to between 35% and 55%, and any 19-mer or 18-mer sequence having three consecutive A or T (i.e., AAA or TTT) or a palindrome sequence with 5 or more bases is excluded. In addition, the 19-mer or 18-mer sequence can be selected to have low sequence homology to other human genes. In one embodiment, potential target sequences are searched by BLASTN against NCBI's human UniGene cluster sequence database. The human UniGene database contains non-redundant sets of gene-oriented clusters. Each UniGene cluster includes sequences that represent a unique gene. 19-mer/18-mer sequences producing no hit to other human genes under the BLASTN search can be selected. During the search, the e-value may be set at a stringent value (such as “1”). Furthermore, the target sequence can be selected from the ORF region, and is at least 75-bp from the start and stop codons. Examples of the target sequences (SEQ ID NO:3n+1) prepared using these criteria (“Stringent Criteria”) are demonstrated in Table 3. siRNA sense and antisense sequences (SEQ ID NO:3n+2 and SEQ ID NO:3n+3, respectively) are also provided.

TABLE 3
RNAi Target Sequences and siRNA Sequences for CRTPGs

| | | Relaxed Criteria: | Stringent Criteria: |
|---|---|---|---|
| | | Target Seq.: SEQ ID NO: 3n + 1 | Target Seq.: SEQ ID NO: 3n + 1 |
| | cDNA | siRNA Sense Seq.: SEQ ID NO: 3n + 2 | siRNA Sense Seq.: SEQ ID NO: 3n + 2 |
| Gene Name | (SEQ ID) | siRNA Antisense Seq.: SEQ ID NO: 3n + 3 | siRNA Antisense Seq.: SEQ ID NO: 3n + 3 |
| ABCC4 | 1 | SEQ ID NOs: 31-1,566 | SEQ ID NOs: 1,567-1,935 |
| C20orf103 | 2 | SEQ ID NOs: 1,936-2,481 | SEQ ID NOs: 2,482-2,535 |
| CACNA1D | 3 | SEQ ID NOs: 2,536-4,974 | SEQ ID NOs: 4,974-5,436 |
| CDH6 | 4 | SEQ ID NOs: 5,437-7,128 | SEQ ID NOs: 7,129-7,356 |
| CST | 5 | SEQ ID NOs: 7,357-7,668 | SEQ ID NOs: 7,669-7,677 |
| ENPP3 | 6 | SEQ ID NOs: 7,678-8,799 | SEQ ID NOs: 8,800-9,039 |
| FLJ11856 | 7 | SEQ ID NOs: 9,040-9,255 | SEQ ID NOs: 9,256-9,264 |
| FOLH1 | 8 | SEQ ID NOs: 9,265-10,218 | SEQ ID NOs: 10,219-10,254 |
| GPR54 | 9 | SEQ ID NOs: 10,255-10,353 | SEQ ID NOs: 10,354-10,365 |
| HAVCR1 | 10 | SEQ ID NOs: 10,366-11,046 | SEQ ID NOs: 11,047-11,145 |
| OR51E2 | 11 | SEQ ID NOs: 11,146-11,955 | |
| SLC6A3 | 12 | SEQ ID NOs: 11,956-12,807 | SEQ ID NOs: 12,808-12,831 |
| SLC30A4 | 13 | SEQ ID NOs: 12,832-13,476 | SEQ ID NOs: 13,477-13,575 |
| TRG@ | 14 | SEQ ID NOs: 13,576-14,199 | SEQ ID NOs: 14,200-14,217 |
| TRPM4 | 15 | SEQ ID NOs: 14,218-14,853 | SEQ ID NOs: 14,854-14,937 |

[0155] The effectiveness of the siRNA sequences can be evaluated using various methods known in the art. For instance, a siRNA sequence of the present invention can be introduced into a cell that expresses a CRTPG. The polypeptide or mRNA level of the CRTPG in the cell can be detected. A substantial change in the expression level of the CRTPG before and after the introduction of the siRNA sequence is indicative of the effectiveness of the siRNA sequence in suppressing the expression of the CRTPG. In one example, the expression levels of other genes are also monitored before and after the introduction of the siRNA sequence. A siRNA sequence which has inhibitory effect on the CRTPG expression but does not significantly affect the expression of other genes can be selected. In another example, multiple siRNA or other RNAi sequences can be introduced into the same target cell. These siRNA or RNAi sequences specifically inhibit the CRTPG gene expression but not the expression of other genes. In yet another example, siRNA or other RNAi sequences that inhibit the expression of both the CRTPG gene and other gene or genes can be used.

[0156] In yet another embodiment, the polynucleotide molecules of the present invention can be modified at the base moiety, sugar moiety or phosphate backbone to improve, e.g., the stability, hybridization, or solubility of the molecule. For example, the deoxyribose phosphate backbone of the polynucleotide molecules can be modified to generate peptide polynucleotides. As used herein, the terms “peptide polynucleotides” or “PNAs” refer to polynucleotide mimics, in which the deoxyribose phosphate backbone is replaced by a pseudopeptide backbone and only the four natural nucleobases are retained. The neutral backbone of PNAs has been shown to allow for specific hybridization to DNA and RNA under conditions of low ionic strength. The synthesis of PNA oligomers can be performed using standard solid phase peptide synthesis protocols.

[0157] PNAs can be used in therapeutic and diagnostic applications. For example, PNAs can be used as antisense or anti-gene agents for sequence-specific modulation of CRTPG expression by inducing transcription or translation arrest or inhibiting replication. PNAs of the polynucleotide molecules of the invention (e.g., set forth in Table 1a or homologs thereof) can also be used in the analysis of single base pair mutations in a gene, (e.g., by PNA-directed PCR clamping), as artificial restriction enzymes when used in combination with other enzymes (e.g., S1 nucleases) or as probes or primers for DNA sequencing or hybridization.

[0158] In another embodiment, PNAs can be modified to enhance their stability or cellular uptake by attaching lipophilic or other helper groups to PNA, by the formation of PNA-DNA chimeras, or by the use of liposomes or other techniques of drug delivery known in the art. For example, PNA-DNA chimeras of the polynucleotide molecules of the invention can be generated. Such chimeras allow DNA recognition enzymes, (e.g., RNase H and DNA polymerases), to interact with the DNA portion while the PNA portion would provide high binding affinity and specificity. PNA-DNA chimeras can be linked using linkers of appropriate lengths selected in terms of base stacking, number of bonds between the nucleobases, and orientation. PNA-DNA chimeras can be synthesized by a variety of means. For example, a DNA chain can be synthesized on a solid support using standard phosphoramidite coupling chemistry and modified nucleoside analogs, e.g., 5′-(4-methoxytrityl)amino-5′-deoxy-thymidine phosphoramidite, can be used as a spacer between the PNA and the 5′ end of DNA. PNA monomers are then coupled in a stepwise manner to produce a chimeric molecule with a 5′ PNA segment and a 3′ DNA segment. Alternatively, chimeric molecules can be synthesized with a 5′ DNA segment and a 3′ PNA segment.

[0159] In other embodiments, a polynucleotide of the present invention can include other appended groups such as peptides (e.g., for targeting host cell receptors in vivo), or agents facilitating transport across the cell membrane or the blood-kidney barrier (see, e.g., PCT Publication No. W089/10134). In addition, a polynucleotide of the present invention can be modified with hybridization-triggered cleavage agents or intercalating agents. To this end, the polynucleotide may be conjugated to another molecule (e.g., a peptide, hybridization triggered cross-linking agent, transport agent, or hybridization-triggered cleavage agent). Finally, a polynucleotide of the present invention can be detectably labeled such that the label can be either directly detected (e.g., a radioactive or fluorescent label) or by the addition of another reagent (e.g., a substrate for an enzymatic label).

Isolated Polypeptides

[0160] Several aspects of the invention pertain to isolated CRTPs and biologically active portions thereof, as well as polypeptide fragments suitable for use as immunogens to raise anti-CRTP antibodies. A “biologically active portion” of a CRTP includes a fragment of a CRTP and exhibits at least one activity of the CRTP. The CRTPs or fragments thereof can be used as targets for developing agents that modulate CRTP-mediated activities.

[0161] In one embodiment, native CRTPs are isolated from cells or tissues by an appropriate purification scheme using standard protein purification techniques. In many embodiments, however, no purification will be necessary.

[0162] The invention provides CRTPs encoded by the CRTPGs set forth in Table 1a, or homologs thereof. In one embodiment, a CRTP homolog is substantially homologous to a CRTP encoded by a CRTPG selected from Table 1a, and retains a functional activity of the CRTP, yet differs in amino acid sequence due to natural allelic variation or mutagenesis. The CRTP homolog may include an amino acid sequence which has at least about 60%, 65%, 70%, 75%, 80%, 85%, 90%, 95%, 98% or more sequence identity or similarity to an amino acid sequence encoded by a CRTPG selected from Table 1a.

[0163] Sequence homology between two amino acid sequences or nucleotide sequences can be determined using a mathematical algorithm. In one embodiment, the percent identity between two amino acid sequences is determined by using the Needleman and Wunsch (J. Mol. Biol., 48:444-453, 1970) algorithm with either a Blossom 62 or PAM250 matrix, a gap weight of 16, 14, 12, 10, 8, 6 or 4, and a length weight of 1, 2, 3, 4, 5 or 6. In another embodiment, the percent identity between two nucleotide sequences is determined by using the GAP program in the GCG software package with an NWSgapdna.CMP matrix, a gap weight of 40, 50, 60, 70 or 80, and a length weight of 1, 2, 3, 4, 5 or 6.

[0164] The invention also provides variants of CRTPs that differ from the original polypeptide by one or more substitutions, deletions, and/or insertions but substantially retain the biological function of the original CRTPs. For instance, a CRTP variant can reduce, enhance or maintain the biological activity of the original CRTP. In one embodiment, the biological activity of a CRTP variant is reduced or enhanced by no more than 50%, 40%, 30%, 20%, 10% or 5% relative to the original CRTP.

[0165] Similarly, the ability of a CRTP variant to react with antigen-specific antisera can be enhanced or reduced by no more than 50%, 40%, 30%, 20%, 10% or 5% relative to the original CRTP. These variants can be prepared and evaluated by modifying the original polypeptide sequence and then determining the reactivity of the modified polypeptide with the antigen-specific antibodies or antisera.

[0166] In making such changes, the hydropathic index of amino acids can be considered. The importance of the hydropathic amino acid index in conferring interactive biologic function on a polypeptide is generally understood in the art. It is believed that the relative hydropathic character of the amino acid residue determines the secondary and tertiary structure of the resultant polypeptide, which in turn defines the interaction of the polypeptide with other molecules, such as enzymes, substrates, receptors, antibodies, antigens, and the like. It is known in the art that an amino acid may be substituted by another amino acid having a similar hydropathic index and still obtain a functionally equivalent polypeptide.

[0167] Substitution of like amino acids can also be made on the basis of hydrophilicity, particularly where the biological functional equivalent polypeptide or polypeptide fragment is intended for use in immunological embodiments. U.S. Pat. No. 4,554,101, which is incorporated hereinafter by reference, states that the greatest local average hydrophilicity of a polypeptide, as governed by the hydrophilicity of its adjacent amino acids, correlates with its immunogenicity and antigenicity, i.e., with a biological property of the polypeptide.

[0168] As detailed in U.S. Pat. No. 4,554,101, the following hydrophilicity values have been assigned to amino acid residues: arginine (+3.0); lysine (+3.0); aspartate (+3.0±1); glutamate (+3.0±1); serine (+0.3); asparagine (+0.2); glutamine (+0.2); glycine (0) praline (−0.5±1); threonine (−0.4); alanine (−0.5); histidine (−0.5); cysteine (−1.0); methionine (−1.3); valine (−1.5); leucine (−1.8); isoleucine (−1.8); tyrosine (−2.3); phenylalanine (−2.5); and tryptophan (−3.4). It is understood that an amino acid may be substituted for another having a similar hydrophilicity value and still obtain a biologically equivalent, such as an immunologically equivalent polypeptide. In such changes, the substitution of amino acids whose hydrophilicity values are within ±2, ±1 or ±0.5 may be used.

[0169] As outlined above, amino acid substitutions may be based on the relative similarity of the amino acid side-chain substituents, for example, their hydrophobicity, hydrophilicity, charge, size, and the like. Examples of suitable substitutions are listed in Table 4.

TABLE 4
Amino Acid Substitutions

| Original | Exemplary Residue |
|---|---|
| Residue | Substitution |
| Ala | Gly; Ser |
| Arg | Lys |
| Asn | Gln; His |
| Asp | Glu |
| Cys | Ser |
| Gln | Asn |
| Glu | Asp |
| Gly | Ala |
| His | Asn; Gln |
| Ile | Leu; Val |
| Leu | Ile; Val |
| Lys | Arg |
| Met | Leu; Tyr |
| Ser | Thr |
| Thr | Ser |
| Trp | Tyr |
| Tyr | Trp; Phe |
| Val | Ile; Leu |

[0170] Polypeptide variants can be prepared by substitution, deletion and/or addition of amino acids that have minimal influence on the biological activity, immunogenicity, secondary structure, tertiary structure and/or hydropathic nature of the polypeptide. For instance, variants can be prepared by substituting, deleting or adding 1, 2, 5, or 10 amino acids residues in the original sequence. In one embodiment, polypeptide variants exhibit at least about 70%, 90%, 95% or more sequence homology to the original polypeptide.

[0171] In another embodiment, CRTPs or mutated CRTPs capable of inhibiting normal CRTP activity (dominant-negative mutants) are produced by recombinant DNA techniques. Alternative to recombinant expression, a CRTP or mutated CRTP can be synthesized chemically using standard peptide synthesis techniques.

[0172] The polynucleotide and protein sequences of the present invention can further be used as “query sequences” to perform a search against a public database to identify other family members or related sequences. Such a search can be performed using a BLAST program available at the BLAST website maintained by the National Center of Biotechnology Information (NCBI), National Library of Medicine, Washington, DC.

[0173] The invention also provides chimeric or fusion CRTPs. A fusion CRTP may contain all or a portion of a CRTP and a fusion partner (non-CRTP-related polypeptide). In one embodiment, a fusion CRTP comprises at least one biologically active portion of a CRTP. The non-CRTP-related polypeptide can be fused to the N-terminus or C-terminus of the CRTP-related polypeptide.

[0174] A peptide linker may be employed to separate the CRTP-related polypeptide from the non-CRTP-related polypeptide by a distance sufficient to ensure that each polypeptide folds into its secondary and tertiary structures. Such a peptide linker sequence is incorporated into the fusion protein using standard techniques well-known in the art. Suitable peptide linker sequences may be chosen based on the following factors: (1) their ability to adopt a flexible extended conformation; (2) their inability to adopt a secondary structure that could interact with functional epitopes on the CRTP-related polypeptide and non-CRTP-related polypeptide; and (3) the lack of hydrophobic or charged residues that might react with the polypeptide functional epitopes. Exemplary peptide linker sequences contain Gly, Asn and Ser residues. Other near neutral amino acids, such as Thr and Ala may also be used in the linker sequence. Amino acid sequences which may be usefully employed as linkers include those disclosed in Maratea et al., Gene, 40:39-46, 1985; Murphy et al., Proc. Natl. Acad. Sci., USA, 83:8258-8262, 1986; U.S. Pat. No. 4,935,233 and U.S. Pat. No. 4,751,180. The linker sequence may generally be from 1 to about 50 amino acids in length. Linker sequences are not required when the CRTP-related polypeptide and non-CRTP-related polypeptide have non-essential N-terminal amino acid regions that can be used to separate the functional domains and prevent steric interference.

[0175] In one embodiment, a fusion protein of the present invention is a glutathione s-transferase (GST)-CRTP fusion protein in which the CRTP sequence is fused to the C-terminus of the GST sequences. Such a fusion protein can facilitate the purification of recombinant CRTPs.

[0176] In another embodiment, the CRTP fusion proteins of the present invention are used as immunogens to produce anti-CRTP antibodies in a subject, to purify CRTP ligands and in screening assays to identify molecules which inhibit the interaction of a CRTP with a CRTP substrate.

[0177] CRTP fusion proteins used as immunogens may comprise a non-CRTP immunogenic polypeptide. In one embodiment, the immunogenic protein is capable of eliciting a recall response. In one example, a CRTP chimeric or fusion protein of the invention is produced by standard recombinant DNA techniques. For example, DNA fragments coding for the different polypeptide sequences are ligated together in-frame in accordance with conventional techniques, for example by employing blunt-ended or stagger-ended termini for ligation, restriction enzyme digestion to provide for appropriate termini, filling-in of cohesive ends as appropriate, alkaline phosphatase treatment to avoid undesirable joining, and enzymatic ligation.

[0178] In another embodiment, the fusion gene can be synthesized by conventional techniques including automated DNA synthesizers. Alternatively, PCR amplification of gene fragments can be carried out using anchor primers which give rise to complementary overhangs between two consecutive gene fragments which can subsequently be annealed and reamplified to generate a chimeric gene sequence. Moreover, many expression vectors are commercially available that already encode a fusion moiety (e.g., a GST polypeptide). A CRTP-encoding polynucleotide can be cloned into such an expression vector such that the fusion moiety is linked in-frame to the CRTP.

[0179] A signal sequence can be used to facilitate secretion and isolation of the secreted protein or other proteins of interest. Signal sequences are typically characterized by a core of hydrophobic amino acids which are generally cleaved from the mature protein during secretion in one or more cleavage events. Such signal peptides contain processing sites that allow cleavage of the signal sequence from the mature proteins as they pass through the secretory pathway. Thus, the invention pertains to the described polypeptides having a signal sequence, as well as to polypeptides from which the signal sequence has been proteolytically cleaved (i.e., the cleavage products). In one embodiment, a polynucleotide sequence encoding a signal sequence can be operably linked in an expression vector to a protein of interest, such as a protein which is ordinarily not secreted or is otherwise difficult to isolate. The signal sequence directs secretion of the protein, such as from a eukaryotic host into which the expression vector is transformed, and the signal sequence is subsequently or concurrently cleaved. The protein can then be readily purified from the extracellular medium by art recognized methods.

[0180] Alternatively, the signal sequence can be linked to the protein of interest using a sequence which facilitates purification, such as with a GST domain.

[0181] The present invention also pertains to mutants of the CRTPs of the invention which function as either agonists or antagonists to the CRTPs. In one embodiment, antagonists or agonists of CRTPs are used as therapeutic agents. For example, antagonists of an up-regulated CRTPG that can decrease the activity or expression of such a gene may ameliorate cancer in a subject wherein the CRTPG is abnormally increased in level or activity. In this embodiment, treatment of such a subject may comprise administering the antagonists to a patient in need thereof so as to decrease activity or expression of the targeted CRTPG. Mutants of the CRTPs can be generated by mutagenesis, e.g., discrete point mutation or truncation of a CRTPN.

[0182] In certain embodiments, an agonist of the CRTPs retains substantially the same, or a subset, of the biological activity of the naturally occurring form of a CRTP or may enhance an activity of a CRTP. In certain embodiments, an antagonist of a CRTP can inhibit one or more of the activities of the naturally occurring form of the CRTP by, for example, competitively modulating an activity of a CRTP. Thus, specific biological effects can be elicited by treatment with a mutant CRTP of limited function. In one embodiment, treatment of a subject with a mutant CRTP having a subset of the biological activities of the naturally occurring form of the protein has fewer side effects in a subject relative to treatment with the naturally occurring form of the CRTP.

[0183] Mutants of a CRTP which function as either CRTP agonists or antagonists can be identified by screening combinatorial libraries of mutants, e.g., truncation mutants, of a CRTP for CRTP agonist or antagonist activity. A variegated library of CRTP mutants can be produced by, for example, enzymatically ligating a mixture of synthetic oligonucleotides into gene sequences such that a degenerate set of potential CRTP sequences is expressible as individual polypeptides, or alternatively, as a set of larger fusion proteins (e.g., for phage display) containing the set of CRTP sequences therein. There are a variety of methods which can be used to produce libraries of potential CRTP variants from a degenerate oligonucleotide sequence. Chemical synthesis of a degenerate gene sequence can be performed in an automatic DNA synthesizer, and the synthetic gene is then ligated into an appropriate expression vector. Use of a degenerate set of genes allows for the provision, in one mixture, of all of the sequences encoding the desired set of potential CRTP sequences. Methods for synthesizing degenerate oligonucleotides are known in the art.

[0184] In addition, libraries of fragments of a protein coding sequence corresponding to a CRTP of the invention can be used to generate a variegated population of CRTP fragments for screening and subsequent selection of mutants of a CRTP. In one embodiment, a library of coding sequence fragments can be generated by treating a double-stranded PCR fragment of a CRTP coding sequence with a nuclease under conditions wherein nicking occurs only about once per molecule, denaturing the double-stranded DNA, renaturing the DNA to form double-stranded DNA which can include sense/antisense pairs from different nicked products, removing single-stranded portions from reformed duplexes by treatment with SI nuclease, and ligating the resulting fragment library into an expression vector. By this method, an expression library, which encodes N-terminal, C-terminal and internal fragments of various sizes of the CRTPs, can be derived.

[0185] Several techniques are known in the art for screening gene products of combinatorial libraries made by point mutations or truncation, and for screening cDNA libraries for gene products having a selected property. The most widely used techniques for screening large gene libraries, which are amenable to high-throughput analysis, typically include cloning a gene library into replicable expression vectors, transforming appropriate cells with the resulting library of vectors, and expressing the combinatorial genes under conditions in which detection of a desired activity facilitates isolation of the vector encoding the gene whose product was detected. Recursive ensemble mutagenesis (REM), a technique which enhances the frequency of functional mutants in the libraries, can be used in combination with the screening assays to identify CRTP mutants (Delgrave et al. Protein Engineering, 6:327-331, 1993).

[0186] CRTPs or portions thereof may also be generated by synthetic means. For example, such polypeptides may be synthesized using any of the commercially available solid-phase techniques, such as the Merrifield solid-phase synthesis method, where amino acids are sequentially added to a growing amino acid chain. Equipment for automated synthesis of polypeptides is commercially available from suppliers such as Perkin Elmer/Applied BioSystems Division (Foster City, Calif.), and may be operated according to the manufacturer's instructions.

Antibodies

[0187] In another aspect, the invention provides antibodies that bind specifically to a CRTP of the present invention. In many embodiments, the antibodies are monoclonal or humanized antibodies.

[0188] The invention provides methods of making hybridomas which produce antibodies useful for diagnosing a patient or animal with cancer. In these methods, a CRTPP or its variant is isolated (e.g., by purification from a cell in which it is expressed or by transcription and translation of a polynucleotide encoding the protein in vivo or in vitro using known methods). A vertebrate, such as a mammal (e.g., a mouse, rabbit or sheep), is immunized using the isolated polypeptide or polypeptide fragment. The vertebrate may be immunized at least one additional time with the isolated polypeptide or polypeptide fragment, so that the vertebrate exhibits a robust immune response to the polypeptide or polypeptide fragment. Splenocytes are isolated from the immunized vertebrate and fused with an immortalized cell line to form hybridomas, using any of a variety of methods well-known in the art. Hybridomas formed in this manner are then screened using standard methods to identify one or more hybridomas which produce an antibody which specifically binds with the polypeptide or polypeptide fragment. The invention also includes hybridomas made by this method and antibodies made using such hybridomas.

[0189] An isolated CRTP, or a portion or fragment thereof, can be used as an immunogen to generate antibodies that bind the CRTPP using standard techniques for polyclonal and monoclonal antibody preparation. A full-length CRTP can be used or, alternatively, the invention provides antigenic peptide fragments of the CRTP for use as immunogens. The antigenic peptide of a CRTP comprises at least 8 amino acid residues of an amino acid sequence encoded by a CRTPG set forth in Table 1a, and encompasses an epitope of a CRTP such that an antibody raised against the peptide forms a specific immune complex with the CRTP. In many instances, the antigenic peptide comprises at least 8, 12, 16, 20 or more amino acid residues.

[0190] Immunogenic portions (epitopes) may generally be identified using well-known techniques. Such techniques include screening polypeptides for the ability to react with antigen-specific antibodies, antisera and/or T cell lines or clones. As used herein, antisera and antibodies are “antigen-specific” if they bind to an antigen with a binding affinity equal to or greater than 10⁵ M⁻¹. Such antisera and antibodies may be prepared using any method known in the art.

[0191] Exemplary epitopes are regions of a CRTP that are located on the surface of the protein, e.g., hydrophilic regions, as well as regions with high antigenicity.

[0192] Another aspect of the invention pertains to the immunologically active portions of the anti-CRTP antibodies. Examples of immunologically active portions of antibodies include F(ab) and F(ab′)2 fragments which can be generated by treating the antibody with an enzyme such as pepsin.

[0193] The anti-CRTP antibodies also include “Single-chain Fv” or “scFv” antibody fragments. The scFv fragments comprise the VH and VL domains of an antibody, wherein these domains are present in a single polypeptide chain. Generally, the Fv polypeptide further comprises a polypeptide linker between the VH and VL domains which enables the scFv to form the desired structure for antigen binding.

[0194] Additionally, recombinant anti-CRTP antibodies, such as chimeric and humanized monoclonal antibodies, comprising both human and non-human portions, which can be made using standard recombinant DNA techniques, are within the scope of the invention. Such chimeric and humanized monoclonal antibodies can be produced by recombinant DNA techniques known in the art.

[0195] In many embodiments, humanized antibodies are desirable for therapeutic treatment of human subjects. Humanized forms of non-human (e.g., murine) antibodies are chimeric molecules of immunoglobulins, immunoglobulin chains or fragments thereof (such as Fv, Fab, Fab′, F(ab′)2 or other antigen-binding subsequences of antibodies), which contain minimal sequence derived from non-human immunoglobulin. Humanized antibodies include human immunoglobulins (recipient antibody) in which residues forming a complementary determining region (CDR) of the recipient are replaced by residues from a CDR of a non-human species (donor antibody) such as mouse, rat or rabbit having the desired specificity, affinity and capacity. In some instances, Fv framework residues of the human immunoglobulin are replaced by corresponding non-human residues. Humanized antibodies may also comprise residues which are found neither in the recipient antibody nor in the imported CDR or framework sequences. In general, the humanized antibody will comprise substantially all of at least one, and typically two, variable domains, in which all or substantially all of the CDR regions correspond to those of a non-human immunoglobulin and all or substantially all of the constant regions being those of a human immunoglobulin consensus sequence. The humanized antibody can also comprise at least a portion of an immunoglobulin constant region (Fc), typically that of a human immunoglobulin.

[0196] Such humanized antibodies can be produced using transgenic mice which are incapable of expressing endogenous immunoglobulin heavy and light chain genes, but which can express human heavy and light chain genes. The transgenic mice are immunized in the normal fashion with a selected antigen, e.g., all or a portion of a polypeptide corresponding to a CRTP of the invention. Monoclonal antibodies directed against the antigen can be obtained using conventional hybridoma technology. The human immunoglobulin transgenes harbored by the transgenic mice rearrange during B cell differentiation, and subsequently undergo class switching and somatic mutation. Thus, using such a technique, it is possible to produce therapeutically useful IgG, IgA and IgE antibodies.

[0197] Humanized antibodies which recognize a selected epitope can be generated using a technique referred to as “guided selection.” In this approach a selected non-human monoclonal antibody, e.g., a murine antibody, is used to guide the selection of a humanized antibody recognizing the same epitope.

[0198] In one embodiment, the antibodies to CRTP are capable of reducing or eliminating the biological function of CRTP, as is described below. That is, the addition of anti-CRTP antibodies (either polyclonal or monoclonal) to CRTP (or cells containing CRTP) may reduce or eliminate the CRTP activity. In one embodiment, at least 25%, 50%, 95, or 100% decrease in activity is achieved.

[0199] An anti-CRTP antibody can be used to isolate a CRTP of the invention by standard techniques, such as affinity chromatography or immunoprecipitation. An anti-CRTP antibody can facilitate the purification of natural CRTPs from cells and of recombinantly produced CRTPs expressed in host cells. Moreover, an anti-CRTP antibody can be used to detect a CRTP (e.g., in a cellular lysate or cell supernatant on the cell surface) in order to evaluate the abundance and pattern of expression of the CRTP. Anti-CRTP antibodies can be used diagnostically to monitor protein levels in tissue as part of a clinical testing procedure, for example, to determine the efficacy of a given treatment regimen. Detection can be facilitated by coupling (i.e., physically linking) the antibody to a detectable substance. Examples of detectable substances include various enzymes, prosthetic groups, fluorescent materials, luminescent materials, bioluminescent materials, and radioactive materials. Examples of suitable enzymes include horseradish peroxidase, alkaline phosphatase, galactosidase, or acetylcholinesterase; examples of suitable prosthetic group complexes include streptavidin/biotin and avidin/biotin; examples of suitable fluorescent materials include umbelliferone, fluorescein, fluorescein isothiocyanate, rhodamine, dichlorotriazinylamine fluorescein, dansyl chloride or phycoerythrin; an example of a luminescent material includes luminol; examples of bioluminescent materials include luciferase, luciferin, and aequorin, and examples of suitable radioactive material include 125I, 131I, 35S or 3H.

[0200] Anti-CRTP antibodies of the invention are also useful for targeting a therapeutic agent to a cell or tissue comprising the antigen of the anti-CRTP antibody. The therapeutic agent may be a cytotoxic drug such as clicheamicin and esteramicin, an enzymatically active toxin of bacterial or plant origin, or an enzymatically active fragment (“A chain”) of such a toxin. Enzymatically active toxins and fragments thereof used are diphtheria A chain, non-binding active fragments of diphtheria toxin, exotoxin A chain (from Pseudomonas aeruginosa), ricin A chain, abrin A chain, modeccin A chain, alpha-sarcin, Aleurites fordii proteins, dianthin proteins, Phytolacca americana proteins (PAPI, PAPII, and PAP-S), momordica charantia inhibitor, curcin, crotin, sapaonaria officinalis inhibitor, gelonin, mitogellin, restrictocin, phenomycin, and enomycin. In another embodiment, the antibodies are conjugated to small molecule anticancer drugs or cytotoxic radioactive isotopes.

[0201] A therapeutic agent may be coupled (e.g., covalently bonded) to a suitable monoclonal antibody either directly or indirectly (e.g., via a linker group). A direct reaction between an agent and an antibody is possible when each possesses a substituent capable of reacting with the other. For example, a nucleophilic group, such as an amino or sulfrydryl group, on one may be capable of reacting with a carbonyl-containing group, such as an anhydride or an acid halide, or with an alkyl group containing a good leaving group (e.g., a halide) on the other.

[0202] Alternatively, it may be desirable to couple a therapeutic agent and an antibody via a linker group. A linker group can function as a spacer to distance an antibody from an agent in order to avoid interference with binding capabilities. A linker group can also serve to increase the chemical reactivity of a substituent on an agent or an antibody, and thus increase the coupling efficiency. An increase in chemical reactivity may also facilitate the use of agents, or functional groups on agents, which otherwise would not be possible.

[0203] It will be evident to those skilled in the art that a variety of bifunctional or polyfunctional reagents, both homo- and hetero-functional, may be employed as the linker group. Coupling may be effected, for example, through amino groups, carboxyl groups, sulfhydryl groups or oxidized carbohydrate residues. There are numerous references describing such methodology, e.g., U.S. Pat. No. 4,671,958, to Rodwell et al.

[0204] Where a therapeutic agent is more potent when free from the antibody portion of the immunoconjugates of the present invention, it may be desirable to use a linker group which is cleavable during or upon internalization into a cell. A number of different cleavable linker groups have been described. The mechanisms for the intracellular release of an agent from these linker groups include cleavage by reduction of a disulfide bond (e.g., U.S. Pat. No. 4,489,710, to Spitler), by irradiation of a photolabile bond (e.g., U.S. Pat. No. 4,625,014, to Senter et al.), by hydrolysis of derivatized amino acid side chains (e.g., U.S. Pat. No. 4,638,045, to Kohn et al.), by serum complement-mediated hydrolysis (e.g., U.S. Pat. No. 4,671,958, to Rodwell et al.), and acid-catalyzed hydrolysis (e.g., U.S. Pat. No. 4,569,789, to Blattler et al.).

[0205] It may be desirable to couple more than one agent to an antibody. In one embodiment, multiple molecules of an agent are coupled to one antibody molecule. In another embodiment, more than one type of agent may be coupled to one antibody. Regardless of the particular embodiment, immunoconjugates with more than one agent may be prepared in a variety of ways. For example, more than one agent may be coupled directly to an antibody molecule, or linkers that provide multiple sites for attachment can be used.

[0206] In one embodiment, antibodies to a CRTP may be used to eliminate the CRTP-containing cell population in vivo by activating the complement system, by mediating antibody-dependent cellular cytotoxicity (ADCC), or by causing uptake of the antibody coated cells by the receptor-mediated endocytosis (RE) system.

CRTP-Specific Cytotoxic Lymphocytes (T Cells)

[0207] Another aspect of the invention pertains to immunotherapeutic compositions comprising T cells specific for a CRTP. Such cells may generally be prepared in vitro or ex vivo using standard procedures. T cells may be isolated from bone marrow, peripheral blood, or a fraction of bone marrow or peripheral blood of a patient, using a commercially available cell separation system, such as the IsolexTM System, available from Nexell Therapeutics, Inc. (Irvine, Calif.). Alternatively, T cells may be derived from related or unrelated humans, non-human mammals, cell lines or cultures.

[0208] T cells may be stimulated with a CRTP or polynucleotide encoding a CRTP and/or an antigen presenting cell (APC) that expresses a CRTP. Such stimulation is performed under conditions and for a time sufficient to permit the generation of T cells that are specific for the polypeptide. In one embodiment, a CRTP or polynucleotide encoding a CRTP is present within a delivery vehicle, such as a microsphere, to facilitate the generation of specific T cells.

[0209] T cells are considered to be specific for a CRTP if the T cells specifically proliferate, secrete cytokines or kill target cells coated with the polypeptide or expressing a gene encoding the polypeptide. T cell specificity may be evaluated using any of a variety of standard techniques, such as chromium release assay or proliferation assay. In these assays, a stimulation index of more than two-fold increase in lysis and/or proliferation, compared to negative controls, indicates T cell specificity. Alternatively, detection of the proliferation of T cells may be accomplished by a variety of known techniques. For example, T cell proliferation can be detected by measuring an increased rate of DNA synthesis (e.g., by pulse-labeling cultures of T cells with tritiated thymidine and measuring the amount of tritiated thymidine incorporated into DNA). Contact with a tumor polypeptide (e.g., 100 ng/ml-100 μg/ml, or 200 ng/ml-25 μg/ml) for 3-7 days may result in at least a two-fold increase in proliferation of the T cells. Contact as described above for 2-3 hours may result in activation of the T cells, as measured using standard cytokine assays in which a two-fold increase in the level of cytokine release (e.g., TNF or IFNγ) is indicative of T cell activation. T cells that have been activated in response to a CRTP, polynucleotide encoding a CRTP, or CRTP-expressing APC may be CD4+and/or CD8+. Tumor protein-specific T cells may be expanded using standard techniques. Within many embodiments, the T cells are derived from a patient, a related donor or an unrelated donor, and are administered to the patient following stimulation and expansion.

[0210] For therapeutic purposes, CD4+ or CD8+ T cells that proliferate in response to a CRTP, polynucleotide encoding a CRTP, or APC can be expanded in number either in vitro or in vivo. Proliferation of such T cells in vitro may be accomplished in a variety of ways. For example, the T cells can be re-exposed to a CRTP, or a short peptide corresponding to an immunogenic portion of such a polypeptide, with or without the addition of T cell growth factors, such as interleukin-2, and/or stimulator cells that synthesize a CRTP. Alternatively, one or more T cells that proliferate in the presence of a CRTP can be expanded in number by cloning. Methods for cloning cells are well-known in the art, and include limiting dilution.

Vaccines

[0211] Within certain aspects, CRTP, CRTP-fusion proteins, CRTPN, CRTP-specific T cell, CRTP-presenting APC, and CRTPG-containing vectors including, but not limited to, expression vectors or gene delivery vectors, may be utilized as vaccines for cancer. Vaccines may comprise one or more such compounds/cells and an immunostimulant. An immunostimulant may be any substance that enhances or potentiates an immune response (antibody and/or cell-mediated) to an exogenous antigen. Examples of immunostimulants include adjuvants, biodegradable microspheres (e.g., polylactic galactide) and liposomes (into which the compound is incorporated). Vaccines within the scope of the present invention may also contain other compounds, which may be biologically active or inactive. For example, one or more immunogenic portions of other tumor antigens may be present, either incorporated into a fusion polypeptide or as a separate compound, within the composition of vaccine.

[0212] A vaccine may contain DNA encoding one or more CRTP or portion of CRTP, such that the polypeptide is generated in situ. As noted above, the DNA may be present within any of a variety of delivery systems known to those of ordinary skill in the art, including nucleic acid expression vectors, gene delivery vectors, and bacteria expression systems. Numerous gene delivery techniques are well-known in the art. Appropriate nucleic acid expression systems contain the necessary DNA sequences for expression in the patient (such as a suitable promoter and terminating signal). Bacterial delivery systems involve the administration of a bacterium (such as Bacillus-Calmette-Guerrin) that expresses an immunogenic portion of the polypeptide on its cell surface or secretes such an epitope. In one embodiment, the DNA may be introduced using a viral expression system (e.g., vaccinia or other pox virus, retrovirus, or adenovirus), which may involve the use of a non-pathogenic (defective), replication competent virus. Techniques for incorporating DNA into such expression systems are well-known to those of ordinary skill in the art. The DNA may also be “naked,” as described, for example, in Ulmer et al., (Science, 259:1745-1749, 1993). A vaccine may comprise both a polynucleotide and a polypeptide component. Such vaccines may provide for an enhanced immune response.

[0213] A vaccine may contain pharmaceutically acceptable salts of the polynucleotides and polypeptides provided herein. Such salts may be prepared from pharmaceutically acceptable non-toxic bases, including organic bases (e.g., salts of primary, secondary and tertiary amines and basic amino acids) and inorganic bases (e.g., sodium, potassium, lithium, ammonium, calcium and magnesium salts).

[0214] Any of a variety of immunostimulants may be employed in the vaccines of this invention. For example, an adjuvant may be included. Most adjuvants contain a substance designed to protect the antigen from rapid catabolism, such as aluminum hydroxide or mineral oil, and a stimulator of immune responses, such as lipid A, Bortadellci pertussis or Mycobacterium tuberculosis derived proteins. Suitable adjuvants are commercially available as, for example, Freund's Incomplete Adjuvant and Complete Adjuvant (Difco Laboratories, Detroit, Mich.); Merck Adjuvant 65 (Merck and Company, Inc., Rahway, N.J.); AS-2 (SmithKline Beecham, Philadelphia, Pa.); aluminum salts such as aluminum hydroxide gel (alum) or aluminum phosphate; salts of calcium, iron or zinc; an insoluble suspension of acylated tyrosine; acylated sugars; cationically or anionically derivatized polysaccharides; polyphosphazenes; biodegradable micro spheres; monophosphoryl lipid A and quil A. Cytokines, such as GM-CSF or IL-2, IL-7, or IL-12, may also be used as adjuvants.

[0215] Within the vaccines provided herein, the adjuvant composition may be designed to induce an immune response predominantly of the Th1 type. High levels of Th1-type cytokines (e.g., IFNyγTNFα, IL-2 and IL-12) tend to favor the induction of cell mediated immune responses to an administered antigen. In contrast, high levels of Th2-type cytokines (e.g., IL-4, IL-5, IL-6 and IL-10) tend to favor the induction of humoral immune responses. Following application of a vaccine as provided herein, a patient will support an immune response that includes Th1- and Th2-type responses. In one embodiment, in which a response is predominantly Th1-type, the level of Th1-type cytokines will increase to a greater extent than the level of Th2-type cytokines. The levels of these cytokines may be readily assessed using standard assays.

[0216] Any of a variety of delivery vehicles may be employed within vaccines to facilitate production of an antigen-specific immune response that targets cancer cells. Delivery vehicles include antigen presenting cells (APCs), such as dendritic cells, macrophages, B cells, monocytes and other cells that may be engineered to be efficient APCs. Such cells may, but need not, be genetically modified to increase the capacity for presenting the antigen, to improve activation and/or maintenance of the T cell response, to have anti-tumor effects per se and/or to be immunologically compatible with the receiver (i.e., matched HLA haplotype). APCs may generally be isolated from any of a variety of biological fluids and organs, including tumor and peritumoral tissues, and may be autologous, allogeneic, syngeneic or xenogenic cells.

[0217] APCs may generally be transfected with a polynucleotide encoding a CRTP (or portion or other variant thereof) such that the CRTP, or an immunogenic portion thereof, is expressed on the cell surface. Such transfection may take place ex vivo, and a composition or vaccine comprising such transfected cells may then be used for therapeutic purposes, as described herein. Alternatively, a gene delivery vehicle that targets a dendritic or other antigen presenting cell may be administered to a patient, resulting in transfection that occurs in vivo. In vivo and ex vivo transfection of dendritic cells, for example, may generally be performed using any methods known in the art, such as those described in WO097/24447, or the gene gun approach described by Mahvi et al., Immunology and Cell Biology, 75:456-460, 1997. Antigen loading of dendritic cells may be achieved by incubating dendritic cells or progenitor cells with the CRTPs, DNA or RNA; or with antigen-expressing recombinant bacterium or viruses (e.g., vaccinia, fowlpox, adenovirus or lentivirus vectors). Prior to loading, the polypeptide may be covalently conjugated to an immunological partner that provides T cell help (e.g., a carrier molecule). Alternatively, a dendritic cell may be pulsed with a non-conjugated immunological partner, separately or in the presence of the polypeptide.

Vectors

[0218] Another aspect of the invention pertains to vectors containing a polynucleotide encoding a CRTP or a portion thereof. One type of vector is a “plasmid,” which includes a circular double-stranded DNA loop into which additional DNA segments can be ligated. Vectors include expression vectors and gene delivery vectors. The latter may be non-plasmid expression vectors, such as viral vectors.

[0219] The expression vectors of the invention comprise a polynucleotide encoding a CRTP or a portion thereof in a form suitable for expression of the polynucleotide in a host cell, which means that the expression vectors include one or more regulatory sequences, selected on the basis of the host cells to be used for expression, which are operatively linked to the polynucleotide sequence to be expressed. It will be appreciated by those skilled in the art that the design of the expression vector can depend on such factors as the choice of the host cell to be transformed, the level of expression of protein desired, and the like. The expression vectors of the invention can be introduced into host cells to thereby produce proteins or peptides, including fusion proteins or peptides, encoded by polynucleotides as described herein (e.g., CRTPs, mutant forms of CRTPs, fusion proteins, and the like).

[0220] The expression vectors of the invention can be designed for the expression of CRTPs in prokaryotic or eukaryotic cells. For example, CRTPs can be expressed in bacterial cells such as E. coli, insect cells (using baculovirus expression vectors), yeast cells, or mammalian cells. In certain embodiments, the proteins thus prepared may be used, for example, as therapeutic proteins. Alternatively, the expression vector can be transcribed and translated in vitro, for example, by using T7 promoter regulatory sequences and T7 polymerase.

[0221] Expression of proteins in prokaryotes is often carried out in E. coli with vectors containing constitutive or inducible promoters directing the expression of either fusion or non-fusion proteins. Fusion vectors add a number of amino acids to a protein encoded therein, usually to the amino terminus of the recombinant protein. Such fusion vectors typically serve three purposes: 1) to increase expression of the recombinant protein; 2) to increase the solubility of the recombinant protein; and 3) to aid in the purification of the recombinant protein by acting as a ligand in affinity purification. Often, in fusion expression vectors, a proteolytic cleavage site is introduced at the junction of the fusion moiety and the recombinant protein to enable separation of the recombinant protein from the fusion moiety subsequent to purification of the fusion protein. Such enzymes, and their cognate recognition sequences, include Factor Xa, thrombin and enterokinase.

[0222] One strategy to maximize recombinant protein expression in E. coli is to express the protein in a host bacterium with an impaired capacity to proteolytically cleave the recombinant protein. Another strategy is to alter the polynucleotide sequence of the polynucleotide to be inserted into an expression vector so that the individual codons for each amino acid are those preferentially utilized in E. coli. Such alteration of polynucleotide sequences of the invention can be carried out by standard DNA synthesis techniques.

[0223] In another embodiment, the CRTP expression vector is a yeast expression vector. Examples of vectors for expression in yeast S. cerevisiae include pYepSec1, pMFa, pJRY88, pYES2 and picZ (Invitrogen Corp, San Diego, Calif.).

[0224] Alternatively, CRTPs of the invention can be expressed in insect cells using baculovirus expression vectors. Baculovirus vectors available for expression of proteins in cultured insect cells (e.g., Sf9 cells) include the pAc series and the pVL series.

[0225] In yet another embodiment, a polynucleotide of the invention is expressed in mammalian cells using a mammalian expression vector.

[0226] In one embodiment, the mammalian expression vector is capable of directing expression of the polynucleotide in a particular cell type (e.g., tissue-specific regulatory elements are used to express the polynucleotide). Tissue-specific regulatory elements are known in the art and may include epithelial cell-specific promoters. Other non-limiting examples of suitable tissue-specific promoters include the liver-specific albumin promoter, lymphoid-specific promoters, promoters of T cell receptors and immunoglobulins, neuron-specific promoters (e.g., the neurofilament promoter), pancreas-specific promoters, and mammary gland-specific promoters (e.g., milk whey promoter). Developmentally-regulated promoters are also encompassed, for example the α-fetoprotein promoter.

[0227] The invention provides a recombinant expression vector comprising a polynucleotide encoding a CRTP cloned into the expression vector in an antisense orientation. That is, the DNA molecule is operatively linked to a regulatory sequence in a manner which allows for expression (by transcription of the DNA molecule) of an RNA molecule which is antisense to the mRNA of the corresponding CRTPG. Regulatory sequences operatively linked to a polynucleotide cloned in the antisense orientation can be chosen to direct the continuous expression of the antisense RNA molecule in a variety of cell types. For instance viral promoters and/or enhancers, or regulatory sequences can be chosen to direct constitutive, tissue specific or cell type specific expression of antisense RNA. The antisense expression vector can be in the form of a recombinant plasmid, phagemid or attenuated virus in which antisense polynucleotides are produced under the control of a high efficiency regulatory region. The activity of the promoter/enhancer can be determined by the cell type into which the vector is introduced.

[0228] The invention further provides gene delivery vehicles for delivery of polynucleotides to cells, tissues, or a mammal for expression. For example, a polynucleotide sequence of the invention can be administered either locally or systemically in a gene delivery vehicle. Expression of the protein coding sequence can be induced using endogenous mammalian or heterologous promoters. Expression of the coding sequence in vivo can be either constituted or regulated. The invention includes gene delivery vehicles capable of expressing the contemplated polynucleotides. The gene delivery vehicle can be, without limitation, a viral vector, such as a retroviral, lentiviral, adenoviral, adeno-associated viral (AAV), herpes viral, or alphavirus vector. The viral vector can also be an astrovirus, coronavirus, orthomyxovirus, papovavirus, paramyxovirus, parvovirus, picornavirus, poxvirus, or togavirus viral vector.

[0229] Delivery of the gene therapy constructs of this invention into cells is not limited to the above mentioned viral vectors. Other delivery methods and media may be employed such as, for example, nucleic acid expression vectors, polycationic condensed DNA linked or unlinked to killed adenovirus alone, ligand linked DNA, liposome-DNA complex, eukaryotic cell delivery vehicles cells, deposition of photopolymerized hydrogel materials, handheld gene transfer particle gun, ionizing radiation, nucleic charge neutralization or fusion with cell membranes. Particle mediated gene transfer may be employed. Briefly, the sequence can be inserted into conventional vectors that contain conventional control sequences for high level expression, and then be incubated with synthetic gene transfer molecules such as polymeric DNA-binding cations like polylysine, protamine, and albumin, linked to cell targeting ligands such as asialoorosomucoid, insulin, galactose, lactose or transferrin. Naked DNA may also be employed. Uptake efficiency of the naked DNA may be improved using biodegradable latex beads.

[0230] Another aspect of the invention pertains to the expression of CRTPGs using a regulatable expression system. Systems to regulate expression of therapeutic genes have been developed and incorporated into the current viral and nonviral gene delivery vectors. These systems include Tet-on/off system, Ecdysone system, progesterone-system, and rapamycin system.

Detection Methods

[0231] As discussed earlier, CRTPGs may be used as markers for detecting or diagnosing cancers. The relative amount of a CRTPG product (polynucleotide or polypeptide) can be detected or measured by any method known in the art.

[0232] Typical methodologies for detection of a transcribed polynucleotide include, but are not limited to, Northern blot, RT-PCR, microarray, and nested-PCR. Typical methodologies for peptide detection include, but are not limited to, immunoassays (such as ELISA or Western blot), gel electrophoresis, and column chromatography.

[0233] In many embodiments, the CRTPGs themselves serve as markers for cancer. For example, an increase in genomic copies of a CRTPG, such as by duplication of the gene, may be correlated with cancer. Detection of the presence or number of copies of all or part of a CRTPG of the invention may be performed using Southern analysis or any other method known in the art.

[0234] The expression level of each CRTPG can be considered individually. Alternatively, two or more CRTPGs can be employed to increase the confidence of the analysis.

Screening Methods

[0235] The invention also provides methods or screening assays for identifying CRTPG modulators. These modulators include compounds or agents (e.g., peptides, peptidomimetics, peptoids, polynucleotides, small molecules, or other drugs) which (a) bind to a CRTP; (b) have a modulatory (e.g., up-regulatory, inductive; potentiating, stimulatory, down-regulatory, suppressive or inhibitory) effect on the activity of a CRTP; (c) have a modulatory effect on the interactions of a CRTP with one or more of its substrates; or (d) have a modulatory effect on the expression of a CRTP. An exemplary assay comprises contacting a compound of interest with cells and comparing the expression of a CRTPG in the cells before and after said contact.

[0236] In many embodiments, the compounds of interest are small molecules or biomolecules. Small molecules include, but are not limited to, inorganic molecules and small organic molecules. Biomolecules include, but are not limited to, naturally-occurring and synthetic compounds that have a bioactivity in mammals, such as polypeptides, polysaccharides, and polynucleotides. One of ordinary skill in the art will appreciate that the nature of a compound of interest may vary depending on the nature of the protein encoded by the CRTPG being investigated.

[0237] The compounds to be tested can be obtained from numerous sources, including systematic libraries of natural and/or synthetic compounds. Test compounds can also be obtained from combinatorial libraries that are constructed according to any method known in the art. Suitable libraries include biological libraries; peptoid libraries (libraries of molecules having the functionalities of peptides, but with a novel, non-peptide backbone which are resistant to enzymatic degradation but which nevertheless remain bioactive; see, e.g., Zuckermann et al., J. Med. Chem., 37:2678-85, 1994); spatially addressable parallel solid phase or solution phase libraries; libraries made by synthetic library methods requiring deconvolution; libraries made by the “one-bead one-compound” library method; and libraries made by synthetic library methods using affinity chromatography selection. See, e.g., Lam, Anticancer Drug Des., 12:145, 1997.

Screening for Inhibitors of CRTP

[0238] The invention provides methods for screening for inhibitors of CRTPs. An exemplary screening method includes obtaining samples from subjects diagnosed with or suspected of having cancer, contacting each aliquot of the samples with one of a plurality of test compounds, and comparing expression of one or more CRTPGs in each of the aliquots to determine whether any of the test compounds substantially decreases the level of expression or activity of a CRTPG relative to samples contacted with other test compounds or relative to an untreated sample or control sample. In addition, the screening methods can include directly contacting a test compound with a protein and then determining the effect of the compound on the activity of the protein.

[0239] Moreover, the invention provides methods for screening compounds capable of modulating the binding between a CRTP and a binding partner. The compounds may be either small molecules or biomolecules. The compounds can be obtained from a variety of libraries well-known in the art.

[0240] Modulators of the expression or protein activity of a CRTPG are useful as therapeutic agents for treating cancers. Such modulators (e.g., antagonists or agonists) may be formulated as pharmaceutical compositions, as described herein below. Such modulators may be used for the diagnosis, treatment, or prognosis of respective cancers.

[0241] Other methods for screening for protein inhibitors are described in U.S. Pat. Nos. 4,980,281, 5,266,464, 5,688,635, and 5,877,007, all of which are incorporated herein by reference.

High-Throughput Screening Assays

[0242] The invention provides methods of conducting high-throughput screening for compounds or agents capable of inhibiting activity or expression of a CRTP. In one embodiment, a method of high-throughput screening involves contacting the test compounds with the CRTP and then detecting the effect of the test compounds on the CRTP.

[0243] A variety of high-throughput functional assays may be used in combination to screen and/or study the reactivity of different types of activating test compounds. Since the coupling system is often difficult to predict, a number of assays may need to be configured to detect a wide range of coupling mechanisms. Numerous techniques that are capable of high-throughput and ultra high throughput screening for activities include, but are not limited to, BRET® or FRET® (both by Packard Instrument Co., Meriden, Conn.), FLIPR® (Molecular Devices Corp, Sunnyvale, Calif.), and BIACORE® systems (Biacore International AB, Uppsala, Sweden).

[0244] In one embodiment, a CRTPG encodes an orphan receptor with an unidentified ligand, and high-throughput assays are utilized to identify the ligand, and then to further identify compounds which prevent the receptor from binding to the ligand.

Detection of Genetic Alterations

[0245] The present invention provides methods for detecting genetic alterations in a CRTPG. These alterations may be associated with aberrant CRTPG expression or GRTP activity. Examples of genetic alterations include (1) deletion, addition, or substitution of one or more nucleotides; (2) a chromosomal rearrangement; (3) alteration in the non-coding regulatory sequences; (4) alteration in the mRNA level; (5) aberrant modification of the genomic sequence, such as changes in the methylation pattern; (6) abnormal RNA splicing; (7) allelic loss of a CRTPG; and (8) inappropriate post-translational modification of CRTPG products. Numerous assays are available for detecting alterations in a CRTPG. These assays include, but are not limited to, selective oligonucleotide hybridization, selective amplification, and selective primer extension, PCR (such as anchor PCR or RACE PCR), ligation chain reaction (LCR), restriction enzyme cleavage reaction, mismatch cleavage reaction, electrophoretic mobility assay, microarray, and sequencing reaction. In one embodiment, the sequence of a CRTPG of a cancer patient is determined and compared to the sequence of a CRTPG of a cancer-free patient.

Diagnostic and Prognostic Assays

[0246] The CRTPGs can be used for the diagnosis of cancer. An exemplary diagnosis method includes the steps of obtaining a biological sample from a subject of interest, determining the expression level of a CRTPG in the biological sample, and comparing the expression level to a reference expression level of the CRTPG. The biological sample can be prepared from any cell or tissue (including fluid) of interest. The reference expression level can be an average expression level of the CRTPG in normal samples. The reference expression level can also be an average expression level of the CRTPG in cancer samples.

[0247] In one embodiment, the expression levels of one or more CRTPGs in a test sample is compared to the expression levels of the same gene(s) in normal samples, and an increase in CRTPG expression in the test sample is indicative of cancer.

[0248] The expression level of a CRTPG can be determined by an immunoassay using an antibody specific for a protein encoded by the CRTPG. Suitable assays for this purpose include, but are not limited to, enzyme linked immunosorbent assays (ELISAs), Western blots, immunoprecipitation, immunofluorescence, and antibody arrays. In many embodiments, the antibody employed in the present invention has a detectable label. In many other embodiments, the antibody is indirectly labeled through a secondary antibody. The antibody can be, without limitation, a polyclonal antibody, a monoclonal antibody, a single chain antibody, or a Fab or F(ab′)₂ fragment.

[0249] The expression level of a CRTPG can also be determined by measuring the level of an RNA transcript encoded by the CRTPG. Suitable assays for this purpose include, but are not limited to, Northern blots, in situ hybridization, RT-PCR, Taqman analysis, and microarrays.

[0250] Furthermore, in vivo techniques for detection of CRTPG expression can be used. These techniques usually include introducing into a subject a labeled anti-CRTP antibody.

[0251] Prognostic assays can be devised to determine whether a subject undergoing treatment for cancer has a poor outlook for long term survival or disease progression. In one embodiment, prognosis can be determined shortly after diagnosis, for example, within a few days. By establishing CRTPG expression profiles of different stages of cancer, from onset to later stages, an expression pattern may emerge to correlate a particular expression profile to increased likelihood of a poor prognosis. The prognosis may then be used to devise a more aggressive treatment program and therefore enhance the likelihood of long-term survival and well-being.

[0252] The diagnostic assays may be used to determine the progression or severity of cancer before and after treatment. The diagnostic assays may also be used to monitor the efficacy of a therapy during clinical trials. For example, the effectiveness of a therapeutic agent can be assessed by monitoring the expression or protein activity of CRTPGs. The expression or protein activity of CRTPGs is therefore a “read-out”, which is indicative of the physiological response of the cells to the agent.

[0253] In one embodiment, a method for monitoring the effectiveness of an agent incldues the steps of (i) obtaining a pre-administration sample from a subject prior to administration of the agent; (ii) detecting the expression level or protein activity of a CRTPG in the pre-administration sample; (iii) obtaining one or more post-administration samples from the subject; (iv) detecting the expression level or protein activity of the CRTPG in the post-administration samples; (v) comparing the expression level or protein activity of the CRTPG in the pre-administration sample with that in the post-administration sample or samples; and (vi) altering the administration of the agent to the subject accordingly. According to such an embodiment, CRTPG expression or activity may be used as an indicator of the effectiveness of an agent, even in the absence of an observable phenotypic response.

[0254] The methods described herein may be performed, for example, by utilizing prepackaged diagnostic kits comprising at least one polynucleotide probe or antibody of the present invention.

[0255] In one embodiment, the comparison between CRTPG expression profiles is performed electronically, such as using a computer system. The computer system comprises a processor coupled to a memory which stores data representing the expression profiles being compared. The memory can be readable as well as rewritable. The expression data stored in the memory can be changed, retrieved or otherwise manipulated. The memory also stores one or more programs capable of causing the processor to compare the stored expression profiles. For instance, the program can execute a pattern recognition algorithm. The processor can also be coupled to a polynucleotide array scanner to receive signals from the scanner.

Methods of Treatment

[0256] The present invention provides methods for treating a cancer patient or a human who is at risk of cancer. As used herein, a treatment can be either prophylactic, therapeutic, or both. A treatment may be specifically tailored or modified based on knowledge obtained from the field of pharmacogenomics. “Pharmacogenomics,” as used herein, includes the application of genomics technologies such as gene sequencing, statistical genetics, and gene expression analysis to drugs in clinical development and on the market. The term refers to the study of how a subject's genes determine his or her response to a drug (e.g., a subject's “drug response phenotype” or “drug response genotype”). Thus, another aspect of the invention provides methods for tailoring an individual's prophylactic or therapeutic treatment with either the CRTPs or CRTP modulators (e.g., agonists or antagonists) according to that individual's drug response. Pharmacogenomics allows a clinician or physician to target prophylactic or therapeutic treatments to subjects who will most benefit from the treatment and to avoid treatment of subjects who will experience toxic drug-related side effects.

[0257] In one aspect, the invention provides a method for preventing a subject from cancer that is associated with aberrant CRTPG expression or activity. The method includes administering to the subject an anti-CRTP antibody or an agent which modulates CRTPG expression or protein activity. Administration of a prophylactic agent can occur prior to the manifestation of symptoms characteristic of the differential CRTPG protein expression, such that cancer is prevented or delayed in its progression.

[0258] Another aspect of the invention pertains to methods of modulating CRTPG protein expression or activity for therapeutic purposes. In one embodiment, the methods include contacting a cell with an agent to modulate the expression or protein activity of a CRTPG of interest. The agent can be a polynucleotide (e.g., an antisense or RNAi molecule), a polypeptide (e.g., a dominant-negative mutant of a CRTP), a naturally-occurring target molecule of a CRTP (e.g., a CRTP substrate), an anti-CRTP antibody, a CRTP modulator (e.g., agonist or antagonist), a peptidomimetic of a CRTPG protein agonist or antagonist, a small molecule drug, or a combination thereof.

[0259] The invention further provides methods for cancer treatment by targeting tumor cells with anti-CRTP antibodies that are capable of inducing antibody-dependent cellular cytotoxicity, activating the complement system and causing the uptake by receptor-medicated endocytosis, or sensitizing the cells to cytotoxins. In some embodiments, the anti-CRTP antibodies are further conjugated to a toxic drug moiety or a radiation source.

Pharmaceutical Compositions

[0260] The invention is further directed to pharmaceutical compositions for treating or preventing cancers. In one embodiment, a pharmaceutical composition of the present invention includes a modulator of the expression or protein activity of a CRTPG. In another embodiment, a pharmaceutical composition of the present invention includes an antibody specific for a protein encoded by a CRTPG, or an antisense or RNAi sequence of the CRTPG. In yet another method, a pharmaceutical composition of the present invention includes a vaccine comprising a CRTP or a fragment thereof, or an expression vector encoding the same.

[0261] The CRTPG modulators, anti-CRTP antibodies, antisense or RNAi sequences, vaccines, or other biologically active agents of the present invention can be formulated into a pharmaceutical composition. A typical pharmaceutical composition includes a pharmaceutically acceptable carrier which may include any solvent, solubilizer, filler, stabilizer, binder, absorbent, base, buffering agent, lubricant, controlled release vehicle, diluent, emulsifying agent, humectant, lubricant, dispersion media, coating, antibacterial or antifungal agent, isotonic or absorption delaying agent that is compatible with pharmaceutical administration. The use of such media and agents for pharmaceutically active substances is well-known in the art. Methods for preparing a pharmaceutical composition of an active agent are well known in the art.

[0262] A pharmaceutical composition of the invention is formulated to be compatible with its intended route of administration. Examples of routes of administration include parenteral, intravenous, intradermal, subcutaneous, oral, inhalative, transdermal topical, transmucosal, or rectal administration. Solutions or suspensions used for parenteral, intradermal, or subcutaneous application can include the following components: a sterile diluent such as water for injection, saline solution, fixed oils, polyethylene glycols, glycerine; propylene glycol or other synthetic solvents; antibacterial agents such as benzyl alcohol or methyl parabens; antioxidants such as ascorbic acid or sodium bisulfate; chelating agents such as ethylenediaminetetraacetic acid; buffers such as acetates, citrates or phosphates and agents for the adjustment of tonicity such as sodium chloride or dextrose. pH can be adjusted with acids or bases, such as hydrochloric acid or sodium hydroxide. The parenteral preparation can be enclosed in ampoules, disposable syringes or multiple dose vials made of glass or plastic.

[0263] Pharmaceutical compositions suitable for injectable use may include sterile aqueous solutions (where water soluble) or dispersions and sterile powders for the extemporaneous preparation of sterile injectable solutions or dispersion. For intravenous administration, suitable carriers include, but are not limited to, physiological saline, bacteriostatic water, Cremophor EL™ (BASF, Parsippany, N.J.) or phosphate buffered saline (PBS). In all cases, the injectable composition should be sterile and should be fluid to the extent that easy syringability exists. In many embodiments, the composition is stable under the conditions of manufacture and storage and can be preserved against the contaminating action of microorganisms such as bacteria and fungi. The carrier can be a solvent or dispersion medium containing, for example, water, ethanol, polyol (for example, glycerol, propylene glycol, and liquid polyetheylene glycol, and the like), and suitable mixtures thereof. The proper fluidity can be maintained, for example, by the use of a coating such as lecithin, by the maintenance of the requited particle size in the case of dispersion and by the use of surfactants. Prevention of the action of microorganisms can be achieved by various antibacterial and antifungal agents, for example, parabens, chlorobutanol, phenol, ascorbic acid, thimerosal, and the like. In many cases, it is desirable to include isotonic agents, for example, sugars, polyalcohols such as manitol, sorbitol, sodium chloride in the composition. Prolonged absorption of the injectable compositions can be brought about by including in the composition an agent which delays absorption, for example, aluminum monostearate and gelatin.

[0264] Sterile injectable solutions can be prepared by incorporating the active compound (e.g., a fragment of a CRTP or an anti-CRTP antibody) in the required amount in an appropriate solvent with one or a combination of ingredients enumerated above, as required, followed by filtered sterilization. In many examples, dispersions are prepared by incorporating the active compound into a sterile vehicle which contains a basic dispersion medium and the required other ingredients from those enumerated above. In the case of sterile powders for the preparation of sterile injectable solutions, example methods of preparation include vacuum drying or freeze-drying which yields a powder of the active ingredient plus any additional desired ingredient from a previously sterile-filtered solution thereof.

[0265] Oral compositions may include an inert diluent or an edible carrier. They can be enclosed in gelatin capsules or compressed into tablets. For the purpose of oral therapeutic administration, the active compound can be incorporated with excipients and used in the form of tablets, troches, or capsules. Oral compositions can also be prepared using a fluid carrier for use as a mouthwash, wherein the compound in the fluid carrier is applied orally and swished and expectorated or swallowed. Pharmaceutically compatible binding agents, and/or adjuvant materials can be included as part of the composition. The tablets, pills, capsules, troches and the like can contain any of the following ingredients, or compounds of a similar nature: a binder such as microcrystalline cellulose, gum tragacanth or gelatin; an excipient such as starch or lactose; a disintegrating agent such as alginic acid, Primogel, or corn starch; a lubricant such as magnesium stearate or Stertes; a glidant such as colloidal silicon dioxide; a sweetening agent such as sucrose or saccharin; or a flavoring agent such as peppermint, methyl salicylate, or orange flavoring.

[0266] For administration by inhalation, the compounds may be delivered in the form of an aerosol spray from a pressured container or dispenser which contains a suitable propellant, e.g., a gas such as carbon dioxide, or a nebulizer.

[0267] Systemic administration may be by transmucosal or transdermal means. For transmucosal or transdermal administration, penetrants appropriate to the barrier to be permeated may be used in the formulation. Such penetrants are generally known in the art, and include, for example, for transmucosal administration, detergents, bile salts, and fusidic acid derivatives. Transmucosal administration may be accomplished through the use of nasal sprays or suppositories. For transdermal administration, a bioactive agent may be formulated into ointments, salves, gels, or creams as generally known in the art.

[0268] A bioactive agent may also be prepared in the form of suppositories (e.g., with conventional suppository bases such as cocoa butter and other glycerides) or retention enemas for rectal delivery.

[0269] In one embodiment, the therapeutic moieties, which may contain a bioactive compound, are prepared with carriers that will protect the compound against rapid elimination from the body, such as a controlled release formulation, including implants and microencapsulated delivery systems. Biodegradable, biocompatible polymers can be used, such as ethylene vinyl acetate, polyanhydrides, polyglycolic acid, collagen, polyorthoesters, and polylactic acid. Methods for preparation of such formulations will be apparent to those skilled in the art. The materials can also be obtained commercially from e.g. Alza Corporation and Nova Pharmaceuticals, Inc. Liposomal suspensions (including liposomes targeted to infected cells with monoclonal antibodies to viral antigens) can also be used as pharmaceutically acceptable carriers.

[0270] In one embodiment, oral or parenteral compositions are formulated in dosage unit form for ease of administration and uniformity of dosage. Dosage unit form as used herein includes physically discrete units suited as unitary dosages for the subject to be treated; each unit contains a predetermined quantity of active compound calculated to produce the desired therapeutic effect in association with the required pharmaceutical carrier. The specification for the dosage unit forms of the invention are dictated by and directly dependent on the unique characteristics of the active compound and the particular therapeutic effect to be achieved, and the limitations inherent in the art of compounding such an active compound for the treatment of individuals.

[0271] Toxicity and therapeutic efficacy of such compounds can be determined by standard pharmaceutical procedures in cell cultures or experimental animals, e.g., for determining the LD50 (the dose lethal to 50% of the population) and the ED50 (the dose therapeutically effective in 50% of the population). The dose ratio between toxic and therapeutic effects is the therapeutic index and it can be expressed as the ratio LD50/ED50. In many embodiments, compounds which exhibit large therapeutic indices are selected. While compounds that exhibit toxic side effects may be used, care should be taken to design a delivery system that targets such compounds to the site of affected tissue in order to minimize potential damage to uninfected cells and, thereby, reduce side effects.

[0272] The data obtained from the cell culture assays and animal studies can be used in formulating a range of dosage for use in humans. In many instances, the dosage of such compounds lies within a range of circulating concentrations that includes the ED50 with little or no toxicity. The dosage may vary within this range depending upon the dosage form employed and the route of administration utilized. For any compound used in the method of the invention, the therapeutically effective dose can be estimated initially from cell culture assays. A dose may be formulated in animal models to achieve a circulating plasma concentration range that includes the IC50 (i.e., the concentration of the test compound which achieves a half-maximal inhibition of symptoms) as determined in cell culture. Such information can be used to more accurately determine useful doses in humans. Levels in plasma may be measured, for example, by high performance liquid chromatography.

[0273] The CRTPGs of the invention can be inserted into gene delivery vectors and used as gene therapy vectors. Gene therapy vectors can be delivered to a subject by, for example, intravenous administration, intraportal administration, intrabiliary administration, intra-arterial administration, direct injection into the liver parenchyma, by intramusclular injection, by inhalation, by perfusion, or by stereotactic injection. The pharmaceutical preparation of the gene therapy vector can include the gene therapy vector in an acceptable diluent, or can comprise a slow release matrix in which the gene delivery vehicle is imbedded. Alternatively, where the complete gene delivery vector can be produced intact from recombinant cells, e.g., retroviral vectors, the pharmaceutical preparation can include one or more cells which produce the gene delivery system.

[0274] The pharmaceutical compositions can be included in a container, pack, or dispenser together with instructions for administration.

Kits

[0275] The invention also encompasses kits for detecting the presence of a CRTPG product in a biological sample. In one embodiment, a kit of the present invention includes an antibody or a fragment thereof, which can specifically bind to a protein encoded by a CRTPG selected from Table 1a. In another embodiment, a kit of the present invention comprises a polynucleotide probe which can hybridize under stringent conditions to an RNA transcript, or the complement thereof, of a CRTPG selected from Table 1a. The antibodies or polynucleotide probes in a kit of the present invention can be stably attached to one or more substrates to form a protein or nucleic acid array.

[0276] The kits of the present invention may also contain control or standard reagents. In many embodiments, a kit of the present invention includes an instruction for using the kit to detect CRTPG protein or polynucleotide.

[0277] The invention further provides kits for assessing the suitability of each of a plurality of compounds for inhibiting cancer in a subject. Such kits include a plurality of compounds to be tested, and a reagent (e.g., an antibody specific to a CRTP, or a probe or primer specific to a CRTPN) for assessing the expression of a CRTPG selected from Table 1a.

[0278] It should be understood that the above-described embodiments and the following examples are given by way of illustration, not limitation. Various changes and modifications within the scope of the present invention will become apparent to those skilled in the art from the present description.

### EXAMPLES

### Example 1

### Microarray and Statistical Analysis of Gene Expression Data

[0279] A combination of research tools, including oligonucleotide microarrays available from Affymetrix Inc. (Santa Clara, Calif.) and databases of biological information available from Gene Logic Inc. (Gaithersburg, Md.), were used for the statistical analysis of gene expression data.

[0280] Affymetrix oligonucleotide microarrays (commercially labeled GeneChips®) are widely used to measure the abundance of mRNA molecules in biological samples. Microarrays provide a method for the simultaneous monitoring of the expression levels of many genes in parallel. Because the oligonucleotide probes for each gene are selected and synthesized at specific locations on the array, the hybridization patterns and intensities provide direct indications of the gene identity and relative amount without the need for additional experimentation.

[0281] Matrices and algorithms are used to generate meaningful information from the intensity data obtained from microarray hybridizations. In an absolute analysis, an experimenter can determine whether a transcript is “present,” “marginal” or “absent.” Alternatively, an experimenter can obtain the average difference value which is a quantitative measure of the relative change in abundance for each transcript between a baseline and an experimental sample. The average difference is directly related to the level of expression of the transcript. In many cases, the average difference is an average of the differences between each perfect match probe cell and its control mismatch probe cell in a probe set. A probe set is a set of probes that are designed to detect one transcript. While the present call/absent call analysis is derived from the numbers of positive and negative probe pairs, the average difference metric uses probe cell intensities directly. More information on microarray analysis can be found in the Affymetrix GeneChip® Expression Analysis Manual, the entire content of which is incorporated herein by reference.

[0282] The GeneChip® Human Genome U95 Set contains five arrays that represent more than 60,000 full-length genes and EST clusters. The first array in the set is the U95Av2 Array (HG-U95Av2) which contains probes for about 12,000 full-length human gene sequences. Arrays B, C, D and E (HG-U95B, HG-U95C, HG-U95D and HG-U95E) contain probes interrogating 50,000 clusters. Each probe set in the GeneChip® Human Genome U95 Set is denoted by a “qualifier” which ends with “₁₃ at”.

[0283] BioExpress™ from Gene Logic Inc. (Gaithersburg, Md.) was employed together with the GeneChip® Human Genome U95 Set. BioExpress™ is a database containing gene expression information in a broad range of normal and diseased human tissue samples.

[0284] The NCBI RefSeqs was used to obtain mRNA and protein sequences. Transmembrane-domain prediction was made using the TMHMM2 program provided by the Center of Biological Sequence Analysis, Technical University of Denmark. Affymetrix U95 chip qualifiers for genes that encode transmembrane proteins (TM-proteins) were determined by BLASTN of the mRNA sequences of these genes against the parent sequences of the probes on the U95 chips. A unique “geneset” of qualifiers for all TM-proteins was obtained. The TM-protein gene set includes 5867 transmembrane proteins.

[0285] A statistical analysis used sixteen sample sets, including eight malignant sample sets (i.e., breast, colon, esophagus, kidney, liver, lung, prostate, and stomach cancer sample sets, respectively) and their corresponding normal counterparts. The analysis included steps of contrast analysis, fold-change analysis, and e-northern analysis using the Gene Logic GX2000 analysis suite.

[0286] The contrast analysis step included eight individual contrast analyses. In each individual contrast analysis, a pattern was defined in which one of the 8 malignant samples had higher expression values than the eight normal samples. Genes were ranked according to their t-scores in a decreasing order. The P value of the contrast analysis was calculated. Only genes with a P value smaller than 0.01 were kept. Eight files were output from the contrast analysis.

[0287] The fold change analysis step included eight fold change analyses. Each of the eight malignant samples was compared to its normal counterpart. Only genes whose expression values were more than two folds higher in malignant tissues than in normal tissues were kept. Eight files were output from the fold change analysis.

[0288] For each malignant sample set, there was one contrast analysis output and one fold change analysis output. The Affymetrix qualifiers in the two files were compared and only the common ones were kept. The common Affymetrix qualifiers were pooled for all the eight malignant sample sets and were further analyzed by the e-northern tool in GX2000.

### Example 2

### E-Northern and Global Analysis

[0289] In the e-northern analysis step, the scatter box plot of each gene was displayed for the sixteen samples. Each of the scatter box plot was studied, and only genes whose median expression value satisfy the following criteria were kept. The gene should have more than 2-fold increased expression in at least one malignant sample as compared to its normal counterpart, and the expression in the malignant sample was greater than all of the eight normal samples.

[0290] A typical e-northern figure (e.g., FIG. 1A) is composed of three parts: left, middle, and right. The left part lists the sample sets used to obtain the plot. It includes the sample set name and number of samples (in parenthesis) in the sample set. The middle part uses bars to describe the “present” percentage of individual samples in the sample set. The present percentage is proportional to the filled length of the bar, which is also labeled by the number below the bar. The right part is the major component of the figure and is composed of plots. Each plot corresponds to one sample set. The vertical bar is positioned along the x-axis according to the expression value of each individual sample. The vertical bars are color coded as follows: red means absent, blue means present and yellow means marginal. There are five numbers below the color-coded bars. The middle one is the median of expression values, the number to the left and next to the median is the 25% quantile and the number to the right and next to the median is the 75% quantile. The leftmost number represents the position that is 1.5-fold interquantile distance away from the 25% quantile. The rightmost number represents the position that is 1.5-fold interquantile distance away from the 75% quantile.

[0291] In a typical global analysis plot (e.g., FIG. 1B), the x-axis describes the sample number and the y-axis describes the expression value. Each light black dot represents the expression value of a single sample. The mean expression value for an individual tissue type was represented by a horizontal colored bar. The position of each colored bar indicates the mean expression value. The existence of blue dots below the mean bars means that the expression of those samples is called “present” in the microarray analysis.

### Example 3

### Transmembrane Hidden Markov Model (TMHMM) Analysis

[0292] The TMHMM profiles of the polypeptides encoded by the CRTPGs were generated using the TMHMM algorithm described by Krogh et al., J Mol. Biol., 305:567-580 (2001).

[0293] The first part of a TMHMM profile gives statistics and locations of the predicted transmembrane helices and intervening loop regions. If the whole sequence is labeled as inside or outside, the prediction is that it contains no membrane helices. The prediction gives the most probable location and orientation of the transmembrane helice(s) in the sequence. An algorithm called N-best (or 1-best in this case) that sums over all paths through the model with the same location and direction of the helices.

[0294] The statistics include:
[0295] Length: the length of the protein sequence;
[0296] Number of predicted TMHs: The number of predicted transmembrane helices;
[0297] Exp number of AAs in TMHs: The expected number of amino acids in transmembrane helices. If this number is larger than 18, it is likely to be a transmembrane protein (or have a signal peptide);
[0298] Exp number, first 60 AAs: The expected number of amino acids in transmembrane helices in the first 60 amino acids of the protein. If this number is more than a few, it could be warned that a predicted transmembrane helix in the N-term could be a signal peptide;
[0299] Total prob of N-in: The total probability that the N-term is on the cytoplasmic side of the membrane; and
[0300] Possible N-term signal sequence: a warning that is produced when “Exp number, first 60 AAs” is larger than 10.

[0301] The second part of a TMHMM profile is a plot of probabilities. The plot shows the posterior probabilities of inside/outside/TM helix. At the top of the plot (between 1 and 1.2) the N-best prediction is shown. The plot is obtained by calculating the total probability that a residue sits in helix, inside, or outside summed over all possible paths through the model. Sometimes the plot and the prediction seem to be contradictory. This is because the plot shows probabilities for each residue, whereas the prediction is the over-all most probable structure. Therefore the plot may be seen as a complementary source of information.

[0302] The foregoing description of the present invention provides illustration and description, but is not intended to be exhaustive or to limit the invention to the precise one disclosed. Modifications and variations are possible consistent with the above teachings or may be acquired from practice of the invention. Thus, it is noted that the scope of the invention is defined by the claims and their equivalents.

1. A pharmaceutical composition comprising a pharmaceutically acceptable carrier and a pharmaceutically effective amount of a component selected from the group consisting of:
an agent capable of modulating an expression level or protein activity of a gene selected from the group consisting of ABCC4, C20orf103, CACNA1D, CDH6, CST, ENPP3, FLJ11856, GPR54, HAVCR1, SLC6A3, SLC30A4, TRG@, and TRPM4;
an antibody specific for a polypeptide encoded by said gene; and
a T cell activated by said polypeptide.

2. The pharmaceutical composition of claim 1, wherein said component is the agent which includes a polynucleotide comprising or encoding a sequence that is capable of inhibiting or decreasing the expression of said gene by RNA interference or an antisense mechanism.

3. The pharmaceutical composition of claim 2, wherein said polynucleotide comprises or encodes an siRNA sequence selected from Table 3.

4. The pharmaceutical composition of claim 1, wherein said component is the antibody which is conjugated with a toxic moiety.

5. The pharmaceutical composition of claim 1, wherein said component is the agent which is capable of inhibiting or decreasing a protein activity of said gene.

6. A method comprising administering a therapeutically or prophylactically effective amount of the pharmaceutical composition of claim 1 to a mammal in need thereof.

7. The method of claim 6, wherein said mammal is a human who has at least one cancer selected from the group consisting of colon cancer, lung cancer, breast cancer, prostate cancer, liver cancer, kidney cancer, stomach cancer, and esophageal cancer.

8. The method of claim 7, wherein said gene is selected from the CRTPGs in Table 1b that correspond to said one cancer.

9. A vaccine formulation comprising:
a polypeptide including an immunogenic fragment encoded by a gene selected from the group consisting of ABCC4, C20orf103, CACNA1D, CDH6, CST, ENPP3, FLJ11856, GPR54, HAVCR1, SLC6A3, SLC30A4, TRG@, and TRPM4; or
an expression vector encoding said polypeptide.

10. A method comprising administering an effective amount of the vaccine formulation of claim 9 to a mammal to elicit an immune response against cancer cells expressing said gene.

11. The method of claim 10, wherein said mammal is a human who has at least one cancer selected from the group consisting of colon cancer, lung cancer, breast cancer, prostate cancer, liver cancer, kidney cancer, stomach cancer, and esophageal cancer.

12. The method of claim 11, wherein said gene is selected from the CRTPGs in Table 1b that correspond to said one cancer.

13. A method for detecting or identifying modulators of the expression or protein activity of a gene, comprising:
contacting an agent of interest with cells expressing said gene; and
comparing the expression or protein activity of said gene before and after said contacting to determine if said agent is a modulator of said gene,
wherein said gene is selected from the group consisting of ABCC4, C20orf103, CACNA1D, CDH6, CST, ENPP3, FLJ11856, GPR54, HAVCR1, SLC6A3, SLC30A4, TRG@, and TRPM4.

14. The method of claim 13, wherein said cells are infected by at least one cancer which is selected from the group consisting of colon cancer, lung cancer, breast cancer, prostate cancer, liver cancer, kidney cancer, stomach cancer, and esophageal cancer, and said gene is selected from the CRTPGs in Table 1b that correspond to said one cancer.

15. A method comprising:
detecting an expression profile of at least one gene in a biological sample of a mammal of interest, and
comparing said expression profile to a reference expression profile of said at least one gene, wherein said at least one gene is selected from the group consisting of ABCC4, C20orf103, CACNA1D, CDH6, CST, ENPP3, FLJ11856, GPR54, HAVCR1, SLC6A3, SLC30A4, TRG@, and TRPM4.

16. The method of claim 15, wherein said mammal of interest is a human who has at least one cancer selected from the group consisting of colon cancer, lung cancer, breast cancer, prostate cancer, liver cancer, kidney cancer, stomach cancer, and esophageal cancer, and said biological sample is a cancer tissue sample.

17. The method of claim 16, wherein said gene is selected from the CRTPGs in Table 1b that correspond to said one cancer.

18. The method of claim 17, wherein said reference expression profile is an average expression profile of said at least one gene in biological samples of cancer-free humans.

19. The method of claim 18, wherein said expression profile and said reference expression profile are determined by RT-PCR, nucleic acid arrays, or immunoassays.

20. A cancer diagnostic kit or device, comprising at least one of:
a polynucleotide probe capable of hybridizing under stringent conditions to a gene selected from the group consisting of ABCC4, C20orf103, CACNA1D, CDH6, CST, ENPP3, FLJ11856, GPR54, HAVCR1, SLC6A3, SLC30A4, TRG@, and TRPM4; and
an antibody specific for a polypeptide encoded by said gene.

The application's sequence listing, which the Patent Office published only in electronic form, follows.

SEQUENCE LISTING (14937 sequences)

SEQ ID NO: 1 - DNA, 4231 bp, Homo sapiens
ggacaggcgtggcggccggagccccagcatccctgcttgaggtccaggagcggagcccgcggccaccgccgcctgatcagcgcgaccccggcccgcgcccgccccgcccggcaagatgctgcccgtgtaccaggaggtgaagcccaacccgctgcaggacgcgaacatctgctcacgcgtgttcttctggtggctcaatcccttgtttaaaattggccataaacggagattagaggaagatgatatgtattcagtgctgccagaagaccgctcacagcaccttggagaggagttgcaagggttctgggataaagaagttttaagagctgagaatgacgcacagaagccttctttaacaagagcaatcataaagtgttactggaaatcttatttagttttgggaatttttacgttaattgaggaaagtgccaaagtaatccagcccatatttttgggaaaaattattaattattttgaaaattatgatcccatggattctgtggctttgaacacagcgtacgcctatgccacggtgctgactttttgcacgctcattttggctatactgcatcacttatatttttatcacgttcagtgtgctgggatgaggttacgagtagccatgtgccatatgatttatcggaaggcacttcgtcttagtaacatggccatggggaagacaaccacaggccagatagtcaatctgctgtccaatgatgtgaacaagtttgatcaggtgacagtgttcttacacttcctgtgggcaggaccactgcaggcgatcgcagtgactgccctactctggatggagataggaatatcgtgccttgctgggatggcagttctaatcattctcctgcccttgcaaagctgttttgggaagttgttctcatcactgaggagtaaaactgcaactttcacggatgccaggatcaggaccatgaatgaagttataactggtataaggataataaaaatgtacgcctgggaaaagtcattttcaaatcttattaccaatttgagaaagaaggagatttccaagattctgagaagttcctgcctcagggggatgaatttggcttcgtttttcagtgcaagcaaaatcatcgtgtttgtgaccttcaccacctacgtgctcctcggcagtgtgatcacagccagccgcgtgttcgtggcagtgacgctgtatggggctgtgcggctgacggttaccctcttcttcccctcagccattgagagggtgtcagaggcaatcgtcagcatccgaagaatccagacctttttgctacttgatgagatatcacagcgcaaccgtcagctgccgtcagatggtaaaaagatggtgcatgtgcaggattttactgctttttgggataaggcatcagagaccccaactctacaaggcctttcctttactgtcagacctggcgaattgttagctgtggtcggccccgtgggagcagggaagtcatcactgttaagtgccgtgctcggggaattggccccaagtcacgggctggtcagcgtgcatggaagaattgcctatgtgtctcagcagccctgggtgttctcgggaactctgaggagtaatattttatttgggaagaaatatgaaaaggaacgatatgaaaaagtcataaaggcttgtgctctgaaaaaggatttacagctgttggaggatggtgatctgactgtgataggagatcggggaaccacgctgagtggagggcagaaagcacgggtaaaccttgcaagagcagtgtatcaagatgctgacatctatctcctggacgatcctctcagtgcagtagatgcggaagttagcagacacttgttcgaactgtgtatttgtcaaattttgcatgagaagatcacaattttagtgactcatcagttgcagtacctcaaagctgcaagtcagattctgatattgaaagatggtaaaatggtgcagaaggggacttacactgagttcctaaaatctggtatagattttggctcccttttaaagaaggataatgaggaaagtgaacaacctccagttccaggaactcccacactaaggaatcgtaccttctcagagtcttcggtttggtctcaacaatcttctagaccctccttgaaagatggtgctctggagagccaagatacagagaatgtcccagttacactatcagaggagaaccgttctgaaggaaaagttggttttcaggcctataagaattacttcagagctggtgctcactggattgtcttcattttccttattctcctaaacactgcagctcaggttgcctatgtgcttcaagattggtggctttcatactgggcaaacaaacaaagtatgctaaatgtcactgtaaatggaggaggaaatgtaaccgagaagctagatcttaactggtacttaggaatttattcaggtttaactgtagctaccgttctttttggcatagcaagatctctattggtattctacgtccttgttaactcttcacaaactttgcacaacaaaatgtttgagtcaattctgaaagctccggtattattctttgatagaaatccaataggaagaattttaaatcgtttctccaaagacattggacacttggatgatttgctgccgctgacgtttttagatttcatccagacattgctacaagtggttggtgtggtctctgtggctgtggccgtgattccttggatcgcaatacccttggttccccttggaatcattttcatttttcttcggcgatattttttggaaacgtcaagagatgtgaagcgcctggaatctacaactcggagtccagtgttttcccacttgtcatcttctctccaggggctctggaccatccgggcatacaaagcagaagagaggtgtcaggaactgtttgatgcacaccaggatttacattcagaggcttggttcttgtttttgacaacgtcccgctggttcgccgtccgtctggatgccatctgtgccatgtttgtcatcatcgttgcctttgggtccctgattctggcaaaaactctggatgccgggcaggttggtttggcactgtcctatgccctcacgctcatggggatgtttcagtggtgtgttcgacaaagtgctgaagttgagaatatgatgatctcagtagaaagggtcattgaatacacagaccttgaaaaagaagcaccttgggaatatcagaaacgcccaccaccagcctggccccatgaaggagtgataatctttgacaatgtgaacttcatgtacagtccaggtgggcctctggtactgaagcatctgacagcactcattaaatcacaagaaaaggttggcattgtgggaagaaccggagctggaaaaagttccctcatctcagccctttttagattgtcagaacccgaaggtaaaatttggattgataagatcttgacaactgaaattggacttcacgatttaaggaagaaaatgtcaatcatacctcaggaacctgttttgttcactggaacaatgaggaaaaacctggatccctttaaggagcacacggatgaggaactgtggaatgccttacaagaggtacaacttaaagaaaccattgaagatcttcctggtaaaatggatactgaattagcagaatcaggatccaattttagtgttggacaaagacaactggtgtgccttgccagggcaattctcaggaaaaatcagatattgattattgatgaagcgacggcaaatgtggatccaagaactgatgagttaatacaaaaaaaaatccgggagaaatttgcccactgcaccgtgctaaccattgcacacagattgaacaccattattgacagcgacaagataatggttttagattcaggaagactgaaagaatatgatgagccgtatgttttgctgcaaaataaagagagcctattttacaagatggtgcaacaactgggcaaggcagaagccgctgccctcactgaaacagcaaaacaggtatacttcaaaagaaattatccacatattggtcacactgaccacatggttacaaacacttccaatggacagccctcgaccttaactattttcgagacagcactgtgaatccaaccaaaatgtcaagtccgttccgaaggcattttccactagtttttggactatgtaaaccacattgtacttttttttactttggcaacaaatatttatacatacaagatgctagttcatttgaatatttctccc

SEQ ID NO: 2 - DNA, 1749 bp, Homo sapiens
gatttgctctgccagcagctgtcggtgccgcgctcgacaccgagtcctagctaggcgctcacagaatacgcgctccctccctcccccttctctgtcccccgcctctcgctcaccccggcccactccagcggcgactttgagggattccctctctggcggcctctgcagcagcacagccggcctcattcggggcactgcgagtatggatctccaaggaagaggggtccccagcatcgacagacttcgagttctcctgatgttgttccatacaatggctcaaatcatggcagaacaagaagtggaaaatctctcaggcctttccactaaccctgaaaaagatatatttgtggtgcgggaaaatgggacgacgtgtctcatggcagagtttgcagccaaatttattgtaccttatgatgtgtgggccagcaactacgtagatctgatcacagaacaggccgatatcgcattgacccggggagctgaggtgaagggccgctgtggccacagccagtcggagctgcaagtgttctgggtggatcgcgcatatgcactcaaaatgctctttgtaaaggaaagccacaacatgtccaagggacctgaggcgacttggaggctgagcaaagtgcagtttgtctacgactcctcggagaaaacccacttcaaagacgcagtcagtgctgggaagcacacagccaactcgcaccacctctctgccttggtcacccccgctgggaagtcctatgagtgtcaagctcaacaaaccatttcactggcctctagtgatccgcagaagacggtcaccatgatcctgtctgcggtccacatccaaccttttgacattatctcagattttgtcttcagtgaagagcataaatgcccagtggatgagcgggagcaactggaagaaaccttgcccctgattttggggctcatcttgggcctcgtcatcatggtaacactcgcgatttaccacgtccaccacaaaatgactgccaaccaggtgcagatccctcgggacagatcccagtataagcacatgggctagaggccgttaggcaggcaccccctattcctgctcccccaactggatcaggtagaacaacaaaagcacttttccatcttgtacacgagatacaccaacatagctacaatcaaacaggcctgggtatctgaggcttgcttggcttgtgtccatgcttaaacccacggaagggggagactctttcggatttgtagggtgaaatggcaattattctctccatgctggggaggaggggaggagggtctcagacagctttcgtgctcatggtggcttggctttgactctccaaagagcaataaatgccacttggagctgtatctggccccaaagtttagggattgaaaacatgcttctttgaggaggaaacccctttaggttcagaagaatatggggtgctttgctcccttggacacagctggcttatcctatacagttgtcaatgcacacagaatacaacctcatgctccctgcagcaagacccctgaaagtgattcatgcttctggctggcattctgcatgtttagtgattgtcttgggaatgtttcactgctacccgcatccagcgactgcagcaccagaaaacgactaatgtaactatgcagagttgtttggacttcttcctgtgccaggtccaagtcgggggacctgaagaatcaatctgtgtgagtctgtttttcaaaatgaaataaaacacactattctctggc

SEQ ID NO: 3 - DNA, 7193 bp, Homo sapiens
agaataagggcagggaccgcggctcctatctcttggtgatccccttccccattccgcccccgcctcaacgcccagcacagtgccctgcacacagtagtcgctcaataaatgttcgtggatgatgatgatgatgatgatgaaaaaaatgcagcatcaacggcagcagcaagcggaccacgcgaacgaggcaaactatgcaagaggcaccagacttcctctttctggtgaaggaccaacttctcagccgaatagctccaagcaaactgtcctgtcttggcaagctgcaatcgatgctgctagacaggccaaggctgcccaaactatgagcacctctgcacccccacctgtaggatctctctcccaaagaaaacgtcagcaatacgccaagagcaaaaaacagggtaactcgtccaacagccgacctgcccgcgcccttttctgtttatcactcaataaccccatccgaagagcctgcattagtatagtggaatggaaaccatttgacatatttatattattggctatttttgccaattgtgtggccttagctatttacatcccattccctgaagatgattctaattcaacaaatcataacttggaaaaagtagaatatgccttcctgattatttttacagtcgagacatttttgaagattatagcgtatggattattgctacatcctaatgcttatgttaggaatggatggaatttactggattttgttatagtaatagtaggattgtttagtgtaattttggaacaattaaccaaagaaacagaaggcgggaaccactcaagcggcaaatctggaggctttgatgtcaaagccctccgtgcctttcgagtgttgcgaccacttcgactagtgtcaggggtgcccagtttacaagttgtcctgaactccattataaaagccatggttcccctccttcacatagcccttttggtattatttgtaatcataatctatgctattataggattggaactttttattggaaaaatgcacaaaacatgtttttttgctgactcagatatcgtagctgaagaggacccagctccatgtgcgttctcagggaatggacgccagtgtactgccaatggcacggaatgtaggagtggctgggttggcccgaacggaggcatcaccaactttgataactttgcctttgccatgcttactgtgtttcagtgcatcaccatggagggctggacagacgtgctctactgggtaaatgatgcgataggatgggaatggccatgggtgtattttgttagtctgatcatccttggctcatttttcgtccttaacctggttcttggtgtccttagtggagaattctcaaaggaaagagagaaggcaaaagcacggggagatttccagaagctccgggagaagcagcagctggaggaggatctaaagggctacttggattggatcacccaagctgaggacatcgatccggagaatgaggaagaaggaggagaggaaggcaaacgaaatactagcatgcccaccagcgagactgagtctgtgaacacagagaacgtcagcggtgaaggcgagaaccgaggctgctgtggaagtctctggtgctggtggagacggagaggcgcggccaaggcggggccctctgggtgtcggcggtggggtcaagccatctcaaaatccaaactcagccgacgctggcgtcgctggaaccgattcaatcgcagaagatgtagggccgccgtgaagtctgtcacgttttactggctggttatcgtcctggtgtttctgaacaccttaaccatttcctctgagcactacaatcagccagattggttgacacagattcaagatattgccaacaaagtcctcttggctctgttcacctgcgagatgctggtaaaaatgtacagcttgggcctccaagcatatttcgtctctcttttcaaccggtttgattgcttcgtggtgtgtggtggaatcactgagacgatcctggtggaactggaaatcatgtctcccctggggatctctgtgtttcggtgtgtgcgcctcttaagaatcttcaaagtgaccaggcactggacttccctgagcaacttagtggcatccttattaaactccatgaagtccatcgcttcgctgttgcttctgctttttctcttcattatcatcttttccttgcttgggatgcagctgtttggcggcaagtttaattttgatgaaacgcaaaccaagcggagcacctttgacaatttccctcaagcacttctcacagtgttccagatcctgacaggcgaagactggaatgctgtgatgtacgatggcatcatggcttacgggggcccatcctcttcaggaatgatcgtctgcatctacttcatcatcctcttcatttgtggtaactatattctactgaatgtcttcttggccatcgctgtagacaatttggctgatgctgaaagtctgaacactgctcagaaagaagaagcggaagaaaaggagaggaaaaagattgccagaaaagagagcctagaaaataaaaagaacaacaaaccagaagtcaaccagatagccaacagtgacaacaaggttacaattgatgactatagagaagaggatgaagacaaggacccctatccgccttgcgatgtgccagtaggggaagaggaagaggaagaggaggaggatgaacctgaggttcctgccggaccccgtcctcgaaggatctcggagttgaacatgaaggaaaaaattgcccccatccctgaagggagcgctttcttcattcttagcaagaccaacccgatccgcgtaggctgccacaagctcatcaaccaccacatcttcaccaacctcatccttgtcttcatcatgctgagcagcgctgccctggccgcagaggaccccatccgcagccactccttccggaacacgatactgggttactttgactatgccttcacagccatctttactgttgagatcctgttgaagatgacaacttttggagctttcctccacaaaggggccttctgcaggaactacttcaatttgctggatatgctggtggttggggtgtctctggtgtcatttgggattcaatccagtgccatctccgttgtgaagattctgagggtcttaagggtcctgcgtcccctcagggccatcaacagagcaaaaggacttaagcacgtggtccagtgcgtcttcgtggccatccggaccatcggcaacatcatgatcgtcactaccctcctgcagttcatgtttgcctgtatcggggtccagttgttcaaggggaagttctatcgctgtacggatgaagccaaaagtaaccctgaagaatgcaggggacttttcatcctctacaaggatggggatgttgacagtcctgtggtccgtgaacggatctggcaaaacagtgatttcaacttcgacaacgtcctctctgctatgatggcgctcttcacagtctccacgtttgagggctggcctgcgttgctgtataaagccatcgactcgaatggagagaacatcggcccaatctacaaccaccgcgtggagatctccatcttcttcatcatctacatcatcattgtagctttcttcatgatgaacatctttgtgggctttgtcatcgttacatttcaggaacaaggagaaaaagagtataagaactgtgagctggacaaaaatcagcgtcagtgtgttgaatacgccttgaaagcacgtcccttgcggagatacatccccaaaaacccctaccagtacaagttctggtacgtggtgaactcttcgcctttcgaatacatgatgtttgtcctcatcatgctcaacacactctgcttggccatgcagcactacgagcagtccaagatgttcaatgatgccatggacattctgaacatggtcttcaccggggtgttcaccgtcgagatggttttgaaagtcatcgcatttaagcctaaggggtattttagtgacgcctggaacacgtttgactccctcatcgtaatcggcagcattatagacgtggccctcagcgaagcggacccaactgaaagtgaaaatgtccctgtcccaactgctacacctgggaactctgaagagagcaatagaatctccatcacctttttccgtcttttccgagtgatgcgattggtgaagcttctcagcaggggggaaggcatccggacattgctgtggacttttattaagtcctttcaggcgctcccgtatgtggccctcctcatagccatgctgttcttcatctatgcggtcattggcatgcagatgtttgggaaagttgccatgagagataacaaccagatcaataggaacaataacttccagacgtttccccaggcggtgctgctgctcttcaggtgtgcaacaggtgaggcctggcaggagatcatgctggcctgtctcccagggaagctctgtgaccctgagtcagattacaaccccggggaggagtatacatgtgggagcaactttgccattgtctatttcatcagtttttacatgctctgtgcatttctgatcatcaatctgtttgtggctgtcatcatggataatttcgactatctgacccgggactggtctattttggggcctcaccatttagatgaattcaaaagaatatggtcagaatatgaccctgaggcaaagggaaggataaaacaccttgatgtggtcactctgcttcgacgcatccagcctcccctggggtttgggaagttatgtccacacagggtagcgtgcaagagattagttgccatgaacatgcctctcaacagtgacgggacagtcatgtttaatgcaaccctgtttgctttggttcgaacggctcttaagatcaagaccgaagggaacctggagcaagctaatgaagaacttcgggctgtgataaagaaaatttggaagaaaaccagcatgaaattacttgaccaagttgtccctccagctggtgatgatgaggtaaccgtggggaagttctatgccactttcctgatacaggactactttaggaaattcaagaaacggaaagaacaaggactggtgggaaagtaccctgcgaagaacaccacaattgccctacaggcgggattaaggacactgcatgacattgggccagaaatccggcgtgctatatcgtgtgatttgcaagatgacgagcctgaggaaacaaaacgagaagaagaagatgatgtgttcaaaagaaatggtgccctgcttggaaaccatgtcaatcatgttaatagtgataggagagattcccttcagcagaccaataccacccaccgtcccctgcatgtccaaaggccttcaattccacctgcaagtgatactgagaaaccgctgtttcctccagcaggaaattcggtgtgtcataaccatcataaccataattccataggaaagcaagttcccacctcaacaaatgccaatctcaataatgccaatatgtccaaagctgcccatggaaagcggcccagcattgggaaccttgagcatgtgtctgaaaatgggcatcattcttcccacaagcatgaccgggagcctcagagaaggtccagtgtgaaaagaacccgctattatgaaacttacattaggtccgactcaggagatgaacagctcccaactatttgccgggaagacccagagatacatggctatttcagggacccccactgcttgggggagcaggagtatttcagtagtgaggaatgctacgaggatgacagctcgcccacctggagcaggcaaaactatggctactacagcagatacccaggcagaaacatcgactctgagaggccccgaggctaccatcatccccaaggattcttggaggacgatgactcgcccgtttgctatgattcacggagatctccaaggagacgcctactacctcccaccccagcatcccaccggagatcctccttcaactttgagtgcctgcgccggcagagcagccaggaagaggtcccgtcgtctcccatcttcccccatcgcacggccctgcctctgcatctaatgcagcaacagatcatggcagttgccggcctagattcaagtaaagcccagaagtactcaccgagtcactcgacccggtcgtgggccacccctccagcaacccctccctaccgggactggacaccgtgctacacccccctgatccaagtggagcagtcagaggccctggaccaggtgaacggcagcctgccgtccctgcaccgcagctcctggtacacagacgagcccgacatctcctaccggactttcacaccagccagcctgactgtccccagcagcttccggaacaaaaacagcgacaagcagaggagtgcggacagcttggtggaggcagtcctgatatccgaaggcttgggacgctatgcaagggacccaaaatttgtgtcagcaacaaaacacgaaatcgctgatgcctgtgacctcaccatcgacgagatggagagtgcagccagcaccctgcttaatgggaacgtgcgtccccgagccaacggggatgtgggccccctctcacaccggcaggactatgagctacaggactttggtcctggctacagcgacgaagagccagaccctgggagggatgaggaggacctggcggatgaaatgatatgcatcaccaccttgtagcccccagcgaggggcagactggctctggcctcaggtggggcgcaggagagccaggggaaaagtgcctcatagttaggaaagtttaggcactagttgggagtaatattcaattaattagacttttgtataagagatgtcatgcctcaagaaagccataaacctggtaggaacaggtcccaagcggttgagcctggcagagtaccatgcgctcggccccagctgcaggaaacagcaggccccgccctctcacagaggatgggtgaggaggccagacctgccctgccccattgtccagatgggcactgctgtggagtctgcttctcccatgtaccagggcaccaggcccacccaactgaaggcatggcggcggggtgcaggggaaagttaaaggtgatgacgatcatcacacctcgtgtcgttacctcagccatcggtctagcatatcagtcactgggcccaacatatccatttttaaaccctttcccccaaatacactgcgtcctggttcctgtttagctgttctgaaata

SEQ ID NO: 4 - DNA, 4521 bp, Homo sapiens
acttcattcacttgcaaatcagtgtgtgcccacaagagccagctctcccgagcccgtaaccttcgcatcccaagagctgcagtttcagccgcgacagcaagaacggcagagccggcgaccgcggcggcggcggcggcggaggcaggagcagcctgggcgggtcgcagggtctccgcgggcgcaggaaggcgagcagagatatcctctgagagccaagcaaagaacattaaggaaggaaggaggaatgaggctggatacggtgcagtgaaaaaggcacttccaagagtggggcactcactacgcacagactcgacggtgccatcagcatgagaacttaccgctacttcttgctgctcttttgggtgggccagccctacccaactctctcaactccactatcaaagaggactagtggtttcccagcaaagaaaagggccctggagctctctggaaacagcaaaaatgagctgaaccgttcaaaaaggagctggatgtggaatcagttctttctcctggaggaatacacaggatccgattatcagtatgtgggcaagttacattcagaccaggatagaggagatggatcacttaaatatatcctttcaggagatggagcaggagatctcttcattattaatgaaaacacaggcgacatacaggccaccaagaggctggacagggaagaaaaacccgtttacatccttcgagctcaagctataaacagaaggacagggagacccgtggagcccgagtctgaattcatcatcaagatccatgacatcaatgacaatgaaccaatattcaccaaggaggtttacacagccactgtccctgaaatgtctgatgtcggtacatttgttgtccaagtcactgcgacggatgcagatgatccaacatatgggaacagtgctaaagttgtctacagtattctacagggacagccctatttttcagttgaatcagaaacaggtattatcaagacagctttgctcaacatggatcgagaaaacagggagcagtaccaagtggtgattcaagccaaggatatgggcggccagatgggaggattatctgggaccaccaccgtgaacatcacactgactgatgtcaacgacaaccctccccgattcccccagagtacataccagtttaaaactcctgaatcttctccaccggggacaccaattggcagaatcaaagccagcgacgctgatgtgggagaaaatgctgaaattgagtacagcatcacagacggtgaggggctggatatgtttgatgtcatcaccgaccaggaaacccaggaagggattataactgtcaaaaagctcttggactttgaaaagaagaaagtgtatacccttaaagtggaagcctccaatccttatgttgagccacgatttctctacttggggcctttcaaagattcagccacggttagaattgtggtggaggatgtagatgagccacctgtcttcagcaaactggcctacatcttacaaataagagaagatgctcagataaacaccacaataggctccgtcacagcccaagatccagatgctgccaggaatcctgtcaagtactctgtagatcgacacacagatatggacagaatattcaacattgattctggaaatggttcgatttttacatcgaaacttcttgaccgagaaacactgctatggcacaacattacagtgatagcaacagagatcaataatccaaagcaaagtagtcgagtacctctatatattaaagttctagatgtcaatgacaacgccccagaatttgctgagttctatgaaacttttgtctgtgaaaaagcaaaggcagatcagttgattcagaccctgcatgctgttgacaaggatgacccttatagtggacaccaattttcgttttccttggcccctgaagcagccagtggctcaaactttaccattcaagacaacaaagacaacacggcgggaatcttaactcggaaaaatggctataatagacacgagatgagcacctatctcttgcctgtggtcatttcagacaacgactacccagttcaaagcagcactgggacagtgactgtccgggtctgtgcatgtgaccaccacgggaacatgcaatcctgccatgcggaggcgctcatccaccccacgggactgagcacgggggctctggttgccatccttctgtgcatcgtgatcctactagtgacagtggtgctgtttgcagctctgaggcggcagcgaaaaaaagagcctttgatcatttccaaagaggacatcagagataacattgtcagttacaacgacgaaggtggtggagaggaggacacccaggcttttgatatcggcaccctgaggaatcctgaagccatagaggacaacaaattacgaagggacattgtgcccgaagcccttttcctaccccgacggactccaacagctcgcgacaacaccgatgtcagagatttcattaaccaaaggttaaaggaaaatgacacggaccccactgccccgccatacgactccttggccacttacgcctatgaaggcactggctccgtggcggattccctgagctcgctggagtcagtgaccacggatgcagatcaagactatgattaccttagtgactggggacctcgattcaaaaagcttgcagatatgtatggaggagtggacagtgacaaagactcctaatctgttgcctttttcattttccaatacgacactgaaatatgtgaagtggctatttctttatatttatccactactccgtgaaggcttctctgttctacccgttccaaaagccaatggctgcagtccgtgtggatccaatgttagagacttttttctagtacacttttatgagcttccaaggggcaaatttttattttttagtgcatccagttaaccaagtcagcccaacaggcaggtgccggaggggaggacagggaacagtatttccacttgttctcagggcagcgtgcccgcttccgctgtcctggtgttttactacactccatgtcaggtcagccaactgccctaactgtacatttcacaggctaatgggataaaggactgtgctttaaagataaaaatatcatcatagtaaaagaaatgagggcatatcggctcacaaagagataaactacataggggtgtttatttgtgtcacaaagaatttaaaataacacttgcccatgctatttgttcttcaagaactttctctgccatcaactactattcaaaacctcaaatccacccatatgttaaaattctcattactcttaaggaatagaagcaaattaaacggtaacatccaaaagcaaccacaaacctagtacgacttcattccttccactaactcatagtttgttatatcctagactagacatgcgaaagtttgcctttgtaccatataaagggggagggaaatagctaataatgttaaccaaggaaatatattttaccatacatttaaagttttggccaccacatgtatcacgggtcacttgaaattctttcagctatcagtaggctaatgtcaaaattgtttaaaaattcttgaaagaattttcctgagacaaattttaacttcttgtctatagttgtcagtattattctactatactgtacatgaaagtagcagtgtgaagtacaataattcatattcttcatatccttcttacacgactaagttgaattagtaaagttagattaaataaaacttaaatctcactctaggagttcagtggagaggttagagccagccacacttgaacctaataccctgcccttgacatctggaaacctctacatatttatataacgtgatacatttggataaacaacattgagattatgatgaaaacctacatattccatgtttggaagacccttggaagaggaaaattggattcccttaaacaaaagtgtttaagattgtaattaaaatgatagttgattttcaaaagcattaattttttttcattgtttttaactttgctttcatgaccatcctgccatccttgactttgaactaatgataaagtaatgatctcaaactatgacagaaaagtaatgtaaaatccatccaatctattatttctctaattatgcaattagcctcatagttattatccagaggacccaactgaactgaactaatccttctggcagattcaaatcgtttatttcacacgctgttctaatggcacttatcattagaatcttaccttgtgcagtcatcagaaattccagcgtactataatgaaaacatccttgttttgaaaacctaaaagacaggctctgtatatatatatacttaagaatatgctgacttcacttattagtcttagggatttattttcaattaatattaattttctacaaataattttagtgtcatttccatttggggatattgtcatatcagcacatattttctgtttggaaacacactgttgtttagttaagttttaaataggtgtattacccaagaagtaaagatggaaacgtt

SEQ ID NO: 5 - DNA, 1791 bp, Homo sapiens
ggcagcctgggagttggacgtggctcaggcagtgggtagaaaggggcagccagccacagcccgagggtctcactgtgtcatccagagctggagtgcagcggcacagtcatggctcactggaactcaggctcaagcaatcctcccgcctcagccttccaagtaactaggactacaggcatgtgccaccacgcctggtgtctgagatgctgccaccgcagaagaagccctgggagtccatggctaaggggctggtgctgggcgcgctcttcactagtttcctgctgctggtgtactcctatgccgtgcccccgctgcatgccggcctggcctccacgaccccggaggccgcagcgtcctgctctccacctgcactcgagccagaggcagtgatccgggccaacggctcggcgggggagtgccagccgcggcgcaacatcgtgttcttgaagacgcacaagacggccagcagcaccctgctcaacatcctgttccgcttcggccagaagcaccggctcaagttcgccttccctaacggccgcaatgacttcgactacccgaccttcttcgcccgcagcctggtgcaggactatcggcccggggcctgcttcaacatcatctgcaaccacatgcgcttccactacgacgaggtgcgcggcctggtgccgaccaacgccatcttcatcacggtgctccgcgaccccgcccgcttgttcgagtcctccttccactacttcgggccggtggtgcccctcacgtggaagctctcggccggcgacaagctgaccgagttcctgcaagacccggatcgctactacgaccccaacggcttcaatgcccactacctccgaaacctgctcttcttcgacctgggctatgacaacagcctggaccccagcagcccgcaggtgcaggagcacatcctggaggtggagcgtcgcttccacctggtgctccttcaagagtacttcgacgagtcgctggtgctgctgaaggacctgctgtgctgggagctggaggacgtgctctacttcaagctcaacgcccgccgcgactcgcccgtgccgcggctctcgggggagctgtatgggcgcgccaccgcctggaacatgctggactcccacctctaccgccacttcaacgccagcttctggcgcaaggtggaggccttcgggcgggagcgcatggcccgcgaggtggccgccctgcgccatgccaacgagcgcatgcggaccatctgcatcgacgggggccacgccgtggacgccgccgccatccaggacgaggccatgcagccctggcagccgctgggcaccaagtccatcctgggctacaacctcaagaagagcatcgggcagcggcacgcgcagctctgccggcgcatgctcacgcccgagatccagtacctgatggacctcggcgccaacctgtgggtcaccaagctctggaagttcattcgcgatttcctgcggtggtgacgtcccaccgcccagcggcttgcctgcctgctcgctccctgcagaggggctgagcaggacgccgctggtgctggccgcccccagccccctcctggtgccacctcagaccccggggtgagggggggctccctggggggaggcagccagccaagactgggcccatgaacacagagagggcctaaccgagatcagtatttaactaattataccagtttttattaaacccctttccctccccgataaagaatgttctatttctgcctccccttaaaggggagacctcagaagtaaaggaatttgatgttgtgtttttgtt

SEQ ID NO: 6 - DNA, 2794 bp, Homo sapiens
aggagcctactttattctgataaaacaggtctatgcagctaccaggacaatggaatctacgttgactttagcaacggaacaacctgttaagaagaacactcttaagaaatataaaatagcttgcattgttcttcttgctttgctggtgatcatgtcacttggattaggcctggggcttggactcaggaaactggaaaagcaaggcagctgcaggaagaagtgctttgatgcatcatttagaggactggagaactgccggtgtgatgtggcatgtaaagaccgaggtgattgctgctgggattttgaagacacctgtgtggaatcaactcgaatatggatgtgcaataaatttcgttgtggagagaccagattagaggccagcctttgctcttgttcagatgactgtttgcagaagaaagattgctgtgctgactataagagtgtttgccaaggagaaacctcatggctggaagaaaactgtgacacagcccagcagtctcagtgcccagaagggtttgacctgccaccagttatcttgttttctatggatggatttagagctgaatatttatacacatgggatactttaatgccaaatatcaataaactgaaaacatgtggaattcattcaaaatacatgagagctatgtatcctaccaaaaccttcccaaatcattacaccattgtcacgggcttgtatccagagtcacatggcatcattgacaataatatgtatgatgtaaatctcaacaagaatttttcactttcttcaaaggaacaaaataatccagcctggtggcatgggcaaccaatgtggctgacagcaatgtatcaaggtttaaaagccgctacctacttttggcccggatcagaagtggctataaatggctcctttccttccatatacatgccttacaacggaagtgtcccatttgaagagaggatttctacactgttaaaatggctggacctgcccaaagctgaaagacccaggttttataccatgtattttgaagaacctgattcctctggacatgcaggtggaccagtcagtgccagagtaattaaagccttacaggtagtagatcatgcttttgggatgttgatggaaggcctgaagcagcggaatttgcacaactgtgtcaatatcatccttctggctgaccatggaatggaccagacttattgtaacaagatggaatacatgactgattattttcccagaataaacttcttctacatgtacgaagggcctgccccccgcatccgagctcataatatacctcatgacttttttagttttaattctgaggaaattgttagaaacctcagttgccgaaaacctgatcagcatttcaagccctatttgactcctgatttgccaaagcgactgcactatgccaagaacgtcagaatcgacaaagttcatctctttgtggatcaacagtggctggctgttaggagtaaatcaaatacaaattgtggaggaggcaaccatggttataacaatgagtttaggagcatggaggctatctttctggcacatggacccagttttaaagagaagactgaagttgaaccatttgaaaatattgaagtctataacctaatgtgtgatcttctacgcattcaaccagcaccaaacaatggaacccatggtagtttaaaccatcttctgaaggtgcctttttatgagccatcccatgcagaggaggtgtcaaagttttctgtttgtggctttgctaatccattgcccacagagtctcttgactgtttctgccctcacctacaaaatagtactcagctggaacaagtgaatcagatgctaaatctcacccaagaagaaataacagcaacagtgaaagtaaatttgccatttgggaggcctagggtactgcagaagaacgtggaccactgtctcctttaccacagggaatatgtcagtggatttggaaaagctatgaggatgcccatgtggagttcatacacagtcccccagttgggagacacatcgcctctgcctcccactgtcccagactgtctgcgggctgatgtcagggttcctccttctgagagccaaaaatgttccttctatttagcagacaagaatatcacccacggcttcctctatcctcctgccagcaatagaacatcagatagccaatatgatgctttaattactagcaatttggtacctatgtatgaagaattcagaaaaatgtgggactacttccacagtgttcttcttataaaacatgccacagaaagaaatggagtaaatgtggttagtggaccaatatttgattataattatgatggccattttgatgctccagatgaaattaccaaacatttagccaacactgatgttcccatcccaacacactactttgtggtgctgaccagttgtaaaaacaagagccacacaccggaaaactgccctgggtggctggatgtcctaccctttatcatccctcaccgacctaccaacgtggagagctgtcctgaaggtaaaccagaagctctttgggttgaagaaagatttacagctcacattgcccgggtccgtgatgtagaacttctcactgggcttgacttctatcaggataaagtgcagcctgtctctgaaattttgcaactaaagacatatttaccaacatttgaaaccactatttaacttaataatgtctacttaatatataatttactgtataaagtaattttggcaaaatataagtgatttttttctggagaattgtaaaataaagttttctatttttccttaaaaaaaaaa

SEQ ID NO: 7 - DNA, 1853 bp, Homo sapiens
ggcacgagggtccctgggccggacggcggtgtcccggcgtggcgggaagccggcactggagcgggagcgcactgggcgcgggaccgggaggcgcagggaccggacggctcccgagtcgcccacctgacgctagaagaagtcttcacttcccaggagagccaaagcgtgtctggccctaggtgggaaaagaactggctgtgacctttgccctgacctggaagggcccagccttgggctgaatggcagcacccacgcccgcccgtccggtgctgacccacctgctggtggctctcttcggcatgggctcctgggctgcggtcaatgggatctgggtggagctacctgtggtggtcaaagagcttccagagggttggagcctcccctcttacgtctctgtgcttgtggctctggggaacctgggtctgctggtggtgaccctctggaggaggctggccccaggaaaggacgagcaggtccccatccgggtggtgcaggtgctgggcatggtgggcacagccctgctggcctctctgtggcaccatgtggccccagtggcaggacagttgcattctgtggccttcttagcactggcctttgtgctggcactggcatgctgtgcctcgaatgtcactttcctgcccttcttgagccacctgccacctcgcttcttacggtcattcttcctgggtcaaggcctgagtgccctgctgccctgcgtgctggccctagtgcagggtgtgggccgcctcgagtgcccgccagcccccatcaacggcacccctggccccccgctcgacttccttgagcgttttcccgccagcaccttcttctgggcactgactgcccttctggtcgcttcagctgctgccttccagggtcttctgctgctgttgccgccaccaccatctgtacccacaggggagttaggatcaggcctccaggtgggagccccaggagcagaggaagaggtggaagagtcctcaccactgcaagagccaccaagccaggcagcaggcaccacccctggtccagaccctaaggcctatcagcttctatcagcccgcagtgcctgcctgctgggcctgttggccgccaccaacgcgctgaccaatggcgtgctgcctgccgtgcagagcttttcctgcttaccctacgggcgtctggcctaccacctggctgtggtgctgggcagtgctgccaatcccctggcctgcttcctggccatgggtgtgctgtgcaggtccttggcagggctgggcggcctctctctgctgggcgtgttctgtgggggctacctgatggcgctggcagtcctgagcccctgcccgcccctggtgggcacctcggcgggggtggtcctcgtggtgctgtcgtgggtgctgtgtcttggcgtgttctcctacgtgaaggtggcagccagctccctgctgcatggcgggggccggccggcattgctggcagccggcgtggccatccaggtgggctctctgctcggcgctgttgctatgttccccccgaccagcatctatcacgtgttccacagcagaaaggactgtgcagacccctgtgactcctgagcctgggcaggtggggaccccgctccccaacacctgtctttccctcaatgctgccaccatgcctgagtgcctgcagcccaggaggcccgcacaccggtacactcgtggacacctacacactccataggagatcctggctttccagggtgggcaagggcaaggagcaggcttggagccagggaccagtgggggctgtagggtaagcccctgagcctgggacctacatgtggtttgcgtaataaaacatttgtatttaaaaaaaaaaaaaaaaaaaaa

SEQ ID NO: 8 - DNA, 2653 bp, Homo sapiens
ctcaaaaggggccggatttccttctcctggaggcagatgttgcctctctctctcgctcggattggttcagtgcactctagaaacactgctgtggtggagaaactggaccccaggtctggagcgaattccagcctgcagggctgataagcgaggcattagtgagattgagagagactttaccccgccgtggtggttggagggcgcgcagtagagcagcagcacaggcgcgggtcccgggaggccggctctgctcgcgccgagatgtggaatctccttcacgaaaccgactcggctgtggccaccgcgcgccgcccgcgctggctgtgcgctggggcgctggtgctggcgggtggcttctttctcctcggcttcctcttcgggtggtttataaaatcctccaatgaagctactaacattactccaaagcataatatgaaagcatttttggatgaattgaaagctgagaacatcaagaagttcttatataattttacacagataccacatttagcaggaacagaacaaaactttcagcttgcaaagcaaattcaatcccagtggaaagaatttggcctggattctgttgagctagcacattatgatgtcctgttgtcctacccaaataagactcatcccaactacatctcaataattaatgaagatggaaatgagattttcaacacatcattatttgaaccacctcctccaggatatgaaaatgtttcggatattgtaccacctttcagtgctttctctcctcaaggaatgccagagggcgatctagtgtatgttaactatgcacgaactgaagacttctttaaattggaacgggacatgaaaatcaattgctctgggaaaattgtaattgccagatatgggaaagttttcagaggaaataaggttaaaaatgcccagctggcaggggccaaaggagtcattctctactccgaccctgctgactactttgctcctggggtgaagtcctatccagatggttggaatcttcctggaggtggtgtccagcgtggaaatatcctaaatctgaatggtgcaggagaccctctcacaccaggttacccagcaaatgaatatgcttataggcgtggaattgcagaggctgttggtcttccaagtattcctgttcatccaattggatactatgatgcacagaagctcctagaaaaaatgggtggctcagcaccaccagatagcagctggagaggaagtctcaaagtgccctacaatgttggacctggctttactggaaacttttctacacaaaaagtcaagatgcacatccactctaccaatgaagtgacaagaatttacaatgtgataggtactctcagaggagcagtggaaccagacagatatgtcattctgggaggtcaccgggactcatgggtgtttggtggtattgaccctcagagtggagcagctgttgttcatgaaattgtgaggagctttggaacactgaaaaaggaagggtggagacctagaagaacaattttgtttgcaagctgggatgcagaagaatttggtcttcttggttctactgagtgggcagaggagaattcaagactccttcaagagcgtggcgtggcttatattaatgctgactcatctatagaaggaaactacactctgagagttgattgtacaccgctgatgtacagcttggtacacaacctaacaaaagagctgaaaagccctgatgaaggctttgaaggcaaatctctttatgaaagttggactaaaaaaagtccttccccagagttcagtggcatgcccaggataagcaaattgggatctggaaatgattttgaggtgttcttccaacgacttggaattgcttcaggcagagcacggtatactaaaaattgggaaacaaacaaattcagcggctatccactgtatcacagtgtctatgaaacatatgagttggtggaaaagttttatgatccaatgtttaaatatcacctcactgtggcccaggttcgaggagggatggtgtttgagctagccaattccatagtgctcccttttgattgtcgagattatgctgtagttttaagaaagtatgctgacaaaatctacagtatttctatgaaacatccacaggaaatgaagacatacagtgtatcatttgattcacttttttctgcagtaaagaattttacagaaattgcttccaagttcagtgagagactccaggactttgacaaaagcaacccaatagtattaagaatgatgaatgatcaactcatgtttctggaaagagcatttattgatccattagggttaccagacaggcctttttataggcatgtcatctatgctccaagcagccacaacaagtatgcaggggagtcattcccaggaatttatgatgctctgtttgatattgaaagcaaagtggacccttccaaggcctggggagaagtgaagagacagatttatgttgcagccttcacagtgcaggcagctgcagagactttgagtgaagtagcctaagaggattctttagagaatccgtattgaatttgtgtggtatgtcactcagaaagaatcgtaatgggtatattgataaattttaaaattggtatatttgaaataaagttgaatattatatataaaaaaaaaaaaaaaaaaa

SEQ ID NO: 9 - DNA, 1197 bp, Homo sapiens
atgcacaccgtggctacgtccggacccaacgcgtcctggggggcaccggccaacgcctccggctgcccgggctgtggcgccaacgcctcggacggcccagtcccttcgccgcgggccgtggacgcctggctcgtgccgctcttcttcgcggcgctgatgctgctgggcctggtggggaactcgctggtcatctacgtcatctgccgccacaagccgatgcggaccgtgaccaacttctacatcgccaacctggcggccacggacgtgaccttcctcctgtgctgcgtccccttcacggccctgctgtacccgctgcccggctgggtgctgggcgacttcatgtgcaagttcgtcaactacatccagcaggtctcggtgcaggccacgtgtgccactctgaccgccatgagtgtggaccgctggtacgtgacggtgttcccgttgcgcgccctgcaccgccgcacgccccgcctggcgctggctgtcagcctcagcatctgggtaggctctgcggcggtgtctgcgccggtgctcgccctgcaccgcctgtcacccgggccgcgcgcctactgcagtgaggccttccccagccgcgccctggagcgcgccttcgcactgtacaacctgctggcgctgtacctgctgccgctgctcgccacctgcgcctgctatgcggccatgctgcgccacctgggccgggtcgccgtgcgccccgcgcccgccgatagcgccctgcaggggcaggtgctggcagagcgcgcaggcgccgtgcgggccaaggtctcgcggctggtggcggccgtggtcctgctcttcgccgcctgctggggccccatccagctgttcctggtgctgcaggcgctgggccccgcgggctcctggcacccacgcagctacgccgcctacgcgcttaagacctgggctcactgcatgtcctacagcaactccgcgctgaacccgctgctctacgccttcctgggctcgcacttccgacaggccttccgccgcgtctgcccctgcgcgccgcgccgcccccgccgcccccgccggcccggaccctcggaccccgcagccccacacgcggagctgcaccgcctggggtcccacccggcccccgccagggcgcagaagccagggagcagtgggctggccgcgcgcgggctgtgcgtcctgggggaggacaacgcccctctctga

SEQ ID NO: 10 - DNA, 1380 bp, Homo sapiens
caagtggtcatcttaagcctcatcctacatctggcagattctgtagctggttctgtaaaggttggtggagaggcaggtccatctgtcacactaccctgccactacagtggagctgtcacatcaatgtgctggaatagaggctcatgttctctattcacatgccaaaatggcattgtctggaccaatggaacccacgtcacctatcggaaggacacacgctataagctattgggggacctttcaagaagggatgtctctttgaccatagaaaatacagctgtgtctgacagtggcgtatattgttgccgtgttgagcaccgtgggtggttcaatgacatgaaaatcaccgtatcattggagattgtgccacccaaggtcacgactactccaattgtcacaactgttccaaccgtcacgactgttcgaacgagcaccactgttccaacgacaacgactgttccaacgacaactgttccaacaacaatgagcattccaacgacaacgactgttccgacgacaatgactgtttcaacgacaacgagcgttccaacgacaacgagcattccaacaacaacaagtgttccagtgacaacaacggtctctacctttgttcctccaatgcctttgcccaggcagaaccatgaaccagtagccacttcaccatcttcacctcagccagcagaaacccaccctacgacactgcagggagcaataaggagagaacccaccagctcaccattgtactcttacacaacagatgggaatgacaccgtgacagagtcttcagatggcctttggaataacaatcaaactcaactgttcctagaacatagtctactgacggccaataccactaaaggaatctatgctggagtctgtatttctgtcttggtgcttcttgctcttttgggtgtcatcattgccaaaaagtatttcttcaaaaaggaggttcaacaactaagtgtttcatttagcagccttcaaattaaagctttgcaaaatgcagttgaaaaggaagtccaagcagaagacaatatctacattgagaatagtctttatgccacggactaagacccagtggtgctctttgagagtttacgcccatgactgcagaagactgaacaggtatcagcacatcagatgtcttttagactccaagacaatttttctgtttcagtttcatctggcattccaacatgtcagtgatactgggtagagtaactctcccactccaaactgtgtatagtcaacctcatcattaatgtagtcctaatttgttttgctaaaactggctcaatccttctgatcattgcagagttttctctcaaacatgaacactttagaattgtatgttctctttagaccccataaatcctgtat

SEQ ID NO: 11 - DNA, 2799 bp, Homo sapiens
ctcacacaccctgaagacacagtgagttagcaccaccaccaggaattggccttttagctctgtgcctgtctccagtcaggctggaataagtctcctcatatttgcaagctcggccctcccctggaatctaaagcctcctcagccttctgagtcagcctgaaaggaacaggccgaactgctgtatgggctctactgccagtgtgacctcaccctctccagtcacccctcctcagttccagctatgagttcctgcaacttcacacatgccacctttgtgcttattggtatcccaggattagagaaagcccatttctgggttggcttccccctcctttccatgtatgtagtggcaatgtttggaaactgcatcgtggtcttcatcgtaaggacggaacgcagcctgcacgctccgatgtacctctttctctgcatgcttgcagccattgacctggccttatccacatccaccatgcctaagatccttgcccttttctggtttgattcccgagagattagctttgaggcctgtcttacccagatgttctttattcatgccctctcagccattgaatccaccatcctgctggccatggcctttgaccgttatgtggccatctgccacccactgcgccatgctgcagtgctcaacaatacagtaacagcccagattggcatcgtggctgtggtccgcggatccctcttttttttcccactgcctctgctgatcaagcggctggccttctgccactccaatgtcctctcgcactcctattgtgtccaccaggatgtaatgaagttggcctatgcagacactttgcccaatgtggtatatggtcttactgccattctgctggtcatgggcgtggacgtaatgttcatctccttgtcctattttctgataatacgaacggttctgcaactgccttccaagtcagagcgggccaaggcctttggaacctgtgtgtcacacattggtgtggtactcgccttctatgtgccacttattggcctctcagttgtacaccgctttggaaacagccttcatcccattgtgcgtgttgtcatgggtgacatctacctgctgctgcctcctgtcatcaatcccatcatctatggtgccaaaaccaaacagatcagaacacgggtgctggctatgttcaagatcagctgtgacaaggacttgcaggctgtgggaggcaagtgacccttaacactacacttctccttatctttattggcttgataaacataattatttctaacactagcttatttccagttgcccataagcacatcagtacttttctctggctggaatagtaaactaaagtatggtacatctacctaaaggactattatgtggaataatacatactaatgaagtattacatgatttaaagactacaataaaaccaaacatgcttataacattaagaaaaacaataaagatacatgattgaaaccaagttgaaaaatagcatatgccttggaggaaatgtgctcaaattactaatgatttagtgttgtccctactttctctctcttttttctttcttttttttttattatggttagctgtcacatacaacttttttttttttgagatggggtctcgctctgtcaccaggctggagtgcagtggcgcgatctcggctcactgcaacctccacatcccatgttgaagtaattcttctgcctcagcctcccgagtagctgggactagaggaacgtgccaccatgactggctaattttctgtattttttagtagagacagagtttcaccatgttggccaggatggtctcgatctcctgaccttgtgatccacccgcctcagcctcccaaagtgttgggattacaggtgtgaaccactgtgcccggcctgtgtacaactttttaaatagggaatatgatagcttcgcatggtggtgtgcacctatagcccccactgcctggaaagctgaggtgggagaatcgcttgagtccaggagtttgaggttacagtgatccacgatcgtaccactacactccagcctgggcaacggagcaagaccctgtctcaaagcataaaatggaataacatatcaaatgaaacagggaaaatgaagctgacaatttatggaagccagggcttgtcacagtctctactgttattatgcattacctgggaatttatataagcccttaataataatgccaatgaacatctcatgtgtgctcacaatgttctggcactattataagtgcttcacaggttttatgtgttcttcgtaactttatggagtaggtaccatttgtgtctctttattataagtgagagaaatgaagtttatattatcaaggggactaaagtcacacggcttgtgggcactgtgccaagatttaaaattaaatttgatggttgaatacagttacttaatgaccatgttatattgcttcctgtgtaacatctgccatttatttcctcagctgtacaaatcctctgttttctctctgttacacactaacatcaatggctttgtacttgtgatgagagataaccttgccctagttgtgggcaacacatgcagaataatcctgttttacagctgcctttcgtgatcttattgcttgcttttttccagattcagggagaatgttgttgtctatttgtctcttacatctccttgatcatgtcttcattttttaatgtgctctgtacctgtcaaaaattttgaatgtacaccacatgctattgtctgaacctgagtataagataaaataaaattttattttaaattttaaaaaaaaaaaaaaaaaa

SEQ ID NO: 12 - DNA, 3946 bp, Homo sapiens
accgctccggagcgggaggggaggcttcgcggaacgctctcggcgccaggactcgcgtgcaaagcccaggcccgggcggccagaccaagagggaagaagcacagaattcctcaactcccagtgtgcccatgagtaagagcaaatgctccgtgggactcatgtcttccgtggtggccccggctaaggagcccaatgccgtgggcccgaaggaggtggagctcatccttgtcaaggagcagaacggagtgcagctcaccagctccaccctcaccaacccgcggcagagccccgtggaggcccaggatcgggagacctggggcaagaagatcgactttctcctgtccgtcattggctttgctgtggacctggccaacgtctggcggttcccctacctgtgctacaaaaatggtggcggtgccttcctggtcccctacctgctcttcatggtcattgctgggatgccacttttctacatggagctggccctcggccagttcaacagggaaggggccgctggtgtctggaagatctgccccatactgaaaggtgtgggcttcacggtcatcctcatctcactgtatgtcggcttcttctacaacgtcatcatcgcctgggcgctgcactatctcttctcctccttcaccacggagctcccctggatccactgcaacaactcctggaacagccccaactgctcggatgcccatcctggtgactccagtggagacagctcgggcctcaacgacacttttgggaccacacctgctgccgagtactttgaacgtggcgtgctgcacctccaccagagccatggcatcgacgacctggggcctccgcggtggcagctcacagcctgcctggtgctggtcatcgtgctgctctacttcagcctctggaagggcgtgaagacctcagggaaggtggtatggatcacagccaccatgccatacgtggtcctcactgccctgctcctgcgtggggtcaccctccctggagccatagacggcatcagagcatacctgagcgttgacttctaccggctctgcgaggcgtctgtttggattgacgcggccacccaggtgtgcttctccctgggcgtggggttcggggtgctgatcgccttctccagctacaacaagttcaccaacaactgctacagggacgcgattgtcaccacctccatcaactccctgacgagcttctcctccggcttcgtcgtcttctccttcctggggtacatggcacagaagcacagtgtgcccatcggggacgtggccaaggacgggccagggctgatcttcatcatctacccggaagccatcgccacgctccctctgtcctcagcctgggccgtggtcttcttcatcatgctgctcaccctgggtatcgacagcgccatgggtggtatggagtcagtgatcaccgggctcatcgatgagttccagctgctgcacagacaccgtgagctcttcacgctcttcatcgtcctggcgaccttcctcctgtccctgttctgcgtcaccaacggtggcatctacgtcttcacgctcctggaccattttgcagccggcacgtccatcctctttggagtgctcatcgaagccatcggagtggcctggttctatggtgttgggcagttcagcgacgacatccagcagatgaccgggcagcggcccagcctgtactggcggctgtgctggaagctggtcagcccctgctttctcctgttcgtggtcgtggtcagcattgtgaccttcagacccccccactacggagcctacatcttccccgactgggccaacgcgctgggctgggtcatcgccacatcctccatggccatggtgcccatctatgcggcctacaagttctgcagcctgcctgggtcctttcgagagaaactggcctacgccattgcacccgagaaggaccgtgagctggtggacagaggggaggtgcgccagttcacgctccgccactggctcaaggtgtagagggagcagagacgaagaccccaggaagtcatcctgcaatgggagagacacgaacaaaccaaggaaatctaagtttcgagagaaaggagggcaacttctactcttcaacctctactgaaaacacaaacaacaaagcagaagactcctctcttctgactgtttacacctttccgtgccgggagcgcacctcgccgtgtcttgtgttgctgtaataacgacgtagatctgtgcagcgaggtccaccccgttgttgtccctgcagggcagaaaaacgtctaacttcatgctgtctgtgtgaggctccctccctccctgctccctgctcccggctctgaggctgccccaggggcactgtgttctcaggcggggatcacgatccttgtagacgcacctgctgagaatccccgtgctcacagtagcttcctagaccatttactttgcccatattaaaaagccaagtgtcctgcttggtttagctgtgcagaaggtgaaatggaggaaaccacaaattcatgcaaagtcctttcccgatgcgtggctcccagcagaggccgtaaattgagcgttcagttgacacattgcacacacagtctgttcagaggcattggaggatgggggtcctggtatgtctcaccaggaaattctgtttatgttcttgcagcagagagaaataaaactccttgaaaccagctcaggctactgccactcaggcagcctgtgggtccttgtggtgtagggaacggcctgagaggagcgtgtcctatccccggacgcatgcagggcccccacaggagcgtgtcctatccccggacgcatgcagggcccccacaggagcatgtcctatccctggacgcatgcagggcccccacaggagcgtgtactaccccagaacgcatgcagggcccccacaggagcgtgtactaccccaggacgcatgcagggcccccactggagcgtgtactaccccaggacgcatgcagggcccccacaggagcgtgtcctatccccggaccggacgcatgcagggcccccacaggagcgtgtactaccccaggacgcatgcagggcccccacaggagcgtgtactaccccaggatgcatgcagggcccccacaggagcgtgtactaccccaggacgcatgcagggcccccatgcaggcagcctgcagaccaacactctgcctggccttgagccgtgacctccaggaagggaccccactggaattttatttctctcaggtgcgtgccacatcaataacaacagtttttatgtttgcgaatggctttttaaaatcatatttacctgtgaatcaaaacaaattcaagaatgcagtatccgcgagcctgcttgctgatattgcagtttttgtttacaagaataattagcaatactgagtgaaggatgttggccaaaagctgctttccatggcacactgccctctgccactgacaggaaagtggatgccatagtttgaattcatgcctcaagtcggtgggcctgcctacgtgctgcccgagggcaggggccgtgcagggccagtcatggctgtcccctgcaagtggacgtgggctccagggactggagtgtaatgctcggtgggagccgtcagcctgtgaactgccaggcagctgcagttagcacagaggatggcttccccattgccttctggggagggacacagaggacggcttccccatcgccttctggccgctgcagtcagcacagagagcggcttccccattgccttctggggagggacacagaggacagtttccccatcgccttctggttgttgaagacagcacagagagcggcttccccatcgccttctggggaggggctccgtgtagcaacccaggtgttgtccgtgtctgttgaccaatctctattcagcatcgtgtgggtccctaagcacaataaaagacatccacaatggaaaaaaaaaaaggaattc

SEQ ID NO: 13 - DNA, 1720 bp, Homo sapiens
agcgggcagggcggggagaggcggtggctgtgggcgtccggccccgaacctgtcagacctggggagccggcctccagcagcgggcgcggcgggcgcgagcacgaccccactctcctgcggccgcgggtggagcagcgcgagcccgcctcgctgagccggccgggggcggggagatgagttgcggccccgcggcagcgccccaggatggggagggacgcgcggcactgccctcgagaactggcgctccggtgaagtaggcgccgccggccgtccgcctcccccaagccgttccgcaccgcggccgctcagcctctgccatggccggctctggcgcgtggaagcgcctcaaatctatgctaaggaaggatgatgcgccgctgtttttaaatgacaccagcgcctttgacttctcggatgaggcgggggacgaggggctttctcggttcaacaaacttcgagttgtggtggccgatgacggttccgaagccccggaaaggcctgttaacggggcgcacccgaccctccaggccgacgatgattccttactggaccaagacttacctttgaccaacagtcagctgagtttgaaggtggactcctgtgacaactgcagcaaacagagagagatactgaagcagagaaaggtgaaagccaggttgaccattgctgccgttctgtacttgcttttcatgattggagaacttgtaggtggatacattgcaaatagcctagcaatcatgacagatgcacttcatatgttaactgacctaagcgccatcatactcaccctgcttgctttgtggctatcatcaaaatcaccaaccaaaagattcacctttggatttcatcgcttagaggttttgtcagctatgattagtgtgctgttggtgtatatacttatgggattcctcttatatgaagctgtgcaaagaactatccatatgaactatgaaataaatggagatataatgctcatcaccgcagctgttggagttgcagttaatgtaataatggggtttctgttgaaccagtctggtcaccgtcactcccattcccactccctgccttcaaattcccctaccagaggttctgggtgtgaacgtaaccatgggcaggatagcctggcagtgagagctgcatttgtacatgctttgggagatttggtacagagtgttggtgtgctaatagctgcatacatcatacgattcaagccagaatacaagattgctgaccccatctgtacatacgtattttcattacttgtggcttttacaacatttcgaatcatatgggatacagtagttataatactagaaggtgtgccaagccatttgaatgtagactatatcaaagaagccttgatgaaaatagaagatgtatattcagtcgaagatttaaatatctggtctctcacttcaggaaaatctactgccatagttcacatacagctaattcctggaagttcatctaaatgggaggaagtacagtccaaagcaaaccatttattattgaacacatttggcatgtatagatgtactattcagcttcagagttacaggcaagaagtggacagaacttgtgcaaattgtcagagttctagtccctaattttatgtattttgggaactcctgccttatttatcctgcagtcacagacttgagagcaataaatgcaaacctaaatgagaaaaaaaaaaaaaaaaagaaaaaaaaaaaaaaaa

SEQ ID NO: 14 - DNA, 1586 bp, Homo sapiens
gaatcaggaagaccagctcctcctactgtcttctgtgttacgggatcagcgttccttgttgagtgggacctgagttttgagagggtcttctgctcctcttggtctggtcccttacttccaagagccccagagaggaaggcatgctgttggctctagctctgcttctagctttcctgcctcctgccagtcagaaatcttccaacttggaagggagaacaaagtcagtcaccaggccaactgggtcatcagctgtaatcacttgtgatcttcctgtagaaaatgccgtctacacccactggtacctacaccaggaggggaaggccccacagcgtcttctgtactatgactcctacaactccagggttgtgttggaatcaggaatcagtcgagaaaagtatcatacttatgcaagcacagggaagagccttaaatttatactggaaaatctaattgaacgtgactctggggtctattactgtgccacctggaaggattattataagaaactctttggcagtggaacaacacttgttgtcacagataaacaacttgatgcagatgtttcccccaagcccactatttttcttccttcgattgctgaaacaaaactccagaaggctggaacatatctttgtcttcttgagaaatttttcccagatattattaagatacattggcaagaaaagaagagcaacacgattctgggatcccaggaggggaacaccatgaagactaacgacacatacatgaaatttagctggttaacggtgccagaagagtcactggacaaagaacacagatgtatcgtcagacatgagaataataaaaacggaattgatcaagaaattatctttcctccaataaagacagatgtcaccacagtggatcccaaagacagttattcaaaagatgcaaatgatgtcaccacagtggatcccaaatacaattattcaaaggatgcaaatgatgtcatcacaatggatcccaaagacaattggtcaaaagatgcaaatgatacactactgctgcagctcacaaacacctctgcatattacatgtacctcctcctgctcctcaagagtgtggtctattttgccatcatcacctgctgtctgcttggaagaacggctttctgctgcaatggagagaaatcataacagacggtggcacaaggaggccatcttttcctcatcggttattgtccctagaagcgtcttctgaggatctagttgggctttctttctgggtttgggccatttcagttctcatgtgtgtactattctatcattattgtataatggttttcaaaccagtgggcacacagagaacctcagtctgtaataacaatgaggaatagccatggcgatctccagcaccaatctctccatgttttccacagctcctccagccaacccaaatagcgcctgctatagtgtagacagcctgcggcttctagccttgtccctctcttagtgttctttaatcagataactgcctggaagcctttcattttacacgccctgaagcagtcttctttgctagttgaattatgtggtgtgtttttccgtaataagcaaaataaattt

SEQ ID NO: 15 - DNA, 4001 bp, Homo sapiens
ggccgcggcagcatggtggtgccggagaaggagcagagctggatccccaagatcttcaagaagaagacctgcacgacgttcatagttgactccacagatccgggagggaccttgtgccagtgtgggcgcccccggaccgcccaccccgcagtggccatggaggatgccttcggggcagccgtggtgaccgtgtgggacagcgatgcacacaccacggagaagcccaccgatgcctacggagagctggacttcacgggggccggccgcaagcacagcaatttcctccggctctctgaccgaacggatccagctgcagtttatagtctggtcacacgcacatggggcttccgtgccccgaacctggtggtgtcagtgctggggggatcggggggccccgtcctccagacctggctgcaggacctgctgcgtcgtgggctggtgcgggctgcccagagcacaggagcctggattgtcactgggggtctgcacacgggcatcggccggcatgttggtgtggctgtacgggaccatcagatggccagcactgggggcaccaaggtggtggccatgggtgtggccccctggggtgtggtccggaatagagacaccctcatcaaccccaagggctcgttccctgcgaggtaccggtggcgcggtgacccggaggacggggtccagtttcccctggactacaactactcggccttcttcctggtggacgacggcacacacggctgcctggggggcgagaaccgcttccgcttgcgcctggagtcctacatctcacagcagaagacgggcgtgggagggactggaattgacatccctgtcctgctcctcctgattgatggtgatgagaagatgttgacgcgaatagagaacgccacccaggctcagctcccatgtctcctcgtggctggctcagggggagctgcggactgcctggcggagaccctggaagacactctggccccagggagtgggggagccaggcaaggcgaagcccgagatcgaatcaggcgtttctttcccaaaggggaccttgaggtcctgcaggcccaggtggagaggattatgacccggaaggagctcctgacagtctattcttctgaggatgggtctgaggaattcgagaccatagttttgaaggcccttgtgaaggcctgtgggagctcggaggcctcagcctacctggatgagctgcgtttggctgtggcttggaaccgcgtggacattgcccagagtgaactctttcggggggacatccaatggcggtccttccatctcgaagcttccctcatggacgccctgctgaatgaccggcctgagttcgtgcgcttgctcatttcccacggcctcagcctgggccacttcctgaccccgatgcgcctggcccaactctacagcgcggcgccctccaactcgctcatccgcaaccttttggaccaggcgtcccacagcgcaggcaccaaagccccagccctaaaagggggagctgcggagctccggccccctgacgtggggcatgtgctgaggatgctgctggggaagatgtgcgcgccgaggtacccctccgggggcgcctgggaccctcacccaggccagggcttcggggagagcatgtatctgctctcggacaaggccacctcgccgctctcgctggatgctggcctcgggcaggccccctggagcgacctgcttctttgggcactgttgctgaacagggcacagatggccatgtacttctgggagatgggttccaatgcagtttcctcagctcttggggcctgtttgctgctccgggtgatggcacgcctggagcctgacgctgaggaggcagcacggaggaaagacctggcgttcaagtttgaggggatgggcgttgacctctttggcgagtgctatcgcagcagtgaggtgagggctgcccgcctcctcctccgtcgctgcccgctctggggggatgccacttgcctccagctggccatgcaagctgacgcccgtgccttctttgcccaggatggggtacagtctctgctgacacagaagtggtggggagatatggccagcactacacccatctgggccctggttctcgccttcttttgccctccactcatctacacccgcctcatcaccttcaggaaatcagaagaggagcccacacgggaggagctagagtttgacatggatagtgtcattaatggggaagggcctgtcgggacggcggacccagccgagaagacgccgctgggggtcccgcgccagtcgggccgtccgggttgctgcgggggccgctgcggggggcgccggtgcctacgccgctggttccacttctggggcgcgccggtgaccatcttcatgggcaacgtggtcagctacctgctgttcctgctgcttttctcgcgggtgctgctcgtggatttccagccggcgccgcccggctccctggagctgctgctctatttctgggctttcacgctgctgtgcgaggaactgcgccagggcctgagcggaggcgggggcagcctcgccagcgggggccccgggcctggccatgcctcactgagccagcgcctgcgcctctacctcgccgacagctggaaccagtgcgacctagtggctctcacctgcttcctcctgggcgtgggctgccggctgaccccgggtttgtaccacctgggccgcactgtcctctgcatcgacttcatggttttcacggtgcggctgcttcacatcttcacggtcaacaaacagctggggcccaagatcgtcatcgtgagcaagatgatgaaggacgtgttcttcttcctcttcttcctcggcgtgtggctggtagcctatggcgtggccacggaggggctcctgaggccacgggacagtgacttcccaagtatcctgcgccgcgtcttctaccgtccctacctgcagatcttcgggcagattccccaggaggacatggacgtggccctcatggagcacagcaactgctcgtcggagcccggcttctgggcacaccctcctggggcccaggcgggcacctgcgtctcccagtatgccaactggctggtggtgctgctcctcgtcatcttcctgctcgtggccaacatcctgctggtcaacttgctcattgccatgttcagttacacattcggcaaagtacagggcaacagcgatctctactggaaggcgcagcgttaccgcctcatccgggaattccactctcggcccgcgctggccccgccctttatcgtcatctcccacttgcgcctcctgctcaggcaattgtgcaggcgaccccggagcccccagccgtcctccccggccctcgagcatttccgggtttacctttctaaggaagccgagcggaagctgctaacgtgggaatcggtgcataaggagaactttctgctggcacgcgctagggacaagcgggagagcgactccgagcgtctgaagcgcacgtcccagaaggtggacttggcactgaaacagctgggacacatccgcgagtacgaacagcgcctgaaagtgctggagcgggaggtccagcagtgtagccgcgtcctggggtgggtggccgaggccctgagccgctctgccttgctgcccccaggtgggccgccaccccctgacctgcctgggtccaaagactgagccctgctggcggacttcaaggagaagcccccacaggggattttgctcctagagtaaggctcatctgggcctcggcccccgcacctggtggccttgtccttgaggtgagccccatgtccatctgggccactgtcaggaccacctttgggagtgtcatccttacaaaccacagcatgcccggctcctcccagaaccagtcccagcctgggaggatcaaggcctggatcccgggccgttatccatctggaggctgcagggtccttggggtaacagggaccacagacccctcaccactcacagattcctcacactggggaaataaagccatttcagaggaaaaaaaa

SEQ ID NO: 16 - protein, 1325 aa, Homo sapiens
MLPVYQEVKPNPLQDANICSRVFFWWLNPLFKIGHKRRLEEDDMYSVLPEDRSQHLGEELQGFWDKEVLRAENDAQKPSLTRAIIKCYWKSYLVLGIFTLIEESAKVIQPIFLGKIINYFENYDPMDSVALNTAYAYATVLTFCTLILAILHHLYFYHVQCAGMRLRVAMCHMIYRKALRLSNMAMGKTTTGQIVNLLSNDVNKFDQVTVFLHFLWAGPLQAIAVTALLWMEIGISCLAGMAVLIILLPLQSCFGKLFSSLRSKTATFTDARIRTMNEVITGIRIIKMYAWEKSFSNLITNLRKKEISKILRSSCLRGMNLASFFSASKIIVFVTFTTYVLLGSVITASRVFVAVTLYGAVRLTVTLFFPSAIERVSEAIVSIRRIQTFLLLDEISQRNRQLPSDGKKMVHVQDFTAFWDKASETPTLQGLSFTVRPGELLAVVGPVGAGKSSLLSAVLGELAPSHGLVSVHGRIAYVSQQPWVFSGTLRSNILFGKKYEKERYEKVIKACALKKDLQLLEDGDLTVIGDRGTTLSGGQKARVNLARAVYQDADIYLLDDPLSAVDAEVSRHLFELCICQILHEKITILVTHQLQYLKAASQILILKDGKMVQKGTYTEFLKSGIDFGSLLKKDNEESEQPPVPGTPTLRNRTFSESSVWSQQSSRPSLKDGALESQDTENVPVTLSEENRSEGKVGFQAYKNYFRAGAHWIVFIFLILLNTAAQVAYVLQDWWLSYWANKQSMLNVTVNGGGNVTEKLDLNWYLGIYSGLTVATVLFGIARSLLVFYVLVNSSQTLHNKMFESILKAPVLFFDRNPIGRILNRFSKDIGHLDDLLPLTFLDFIQTLLQVVGVVSVAVAVIPWIAIPLVPLGIIFIFLRRYFLETSRDVKRLESTTRSPVFSHLSSSLQGLWTIRAYKAEERCQELFDAHQDLHSEAWFLFLTTSRWFAVRLDAICAMFVIIVAFGSLILAKTLDAGQVGLALSYALTLMGMFQWCVRQSAEVENMMISVERVIEYTDLEKEAPWEYQKRPPPAWPHEGVIIFDNVNFMYSPGGPLVLKHLTALIKSQEKVGIVGRTGAGKSSLISALFRLSEPEGKIWIDKILTTEIGLHDLRKKMSIIPQEPVLFTGTMRKNLDPFKEHTDEELWNALQEVQLKETIEDLPGKMDTELAESGSNFSVGQRQLVCLARAILRKNQILIIDEATANVDPRTDELIQKKIREKFAHCTVLTIAHRLNTIIDSDKIMVLDSGRLKEYDEPYVLLQNKESLFYKMVQQLGKAEAAALTETAKQVYFKRNYPHIGHTDHMVTNTSNGQPSTLTIFETAL

SEQ ID NO: 17 - protein, 280 aa, Homo sapiens
MDLQGRGVPSIDRLRVLLMLFHTMAQIMAEQEVENLSGLSTNPEKDIFVVRENGTTCLMAEFAAKFIVPYDVWASNYVDLITEQADIALTRGAEVKGRCGHSQSELQVFWVDRAYALKMLFVKESHNMSKGPEATWRLSKVQFVYDSSEKTHFKDAVSAGKHTANSHHLSALVTPAGKSYECQAQQTISLASSDPQKTVTMILSAVHIQPFDIISDFVFSEEHKCPVDEREQLEETLPLILGLILGLVIMVTLAIYHVHHKMTANQVQIPRDRSQYKHMG

SEQ ID NO: 18 - protein, 2181 aa, Homo sapiens
MMMMMMMKKMQHQRQQQADHANEANYARGTRLPLSGEGPTSQPNSSKQTVLSWQAAIDAARQAKAAQTMSTSAPPPVGSLSQRKRQQYAKSKKQGNSSNSRPARALFCLSLNNPIRRACISIVEWKPFDIFILLAIFANCVALAIYIPFPEDDSNSTNHNLEKVEYAFLIIFTVETFLKIIAYGLLLHPNAYVRNGWNLLDFVIVIVGLFSVILEQLTKETEGGNHSSGKSGGFDVKALRAFRVLRPLRLVSGVPSLQVVLNSIIKAMVPLLHIALLVLFVIIIYAIIGLELFIGKMHKTCFFADSDIVAEEDPAPCAFSGNGRQCTANGTECRSGWVGPNGGITNFDNFAFAMLTVFQCITMEGWTDVLYWVNDAIGWEWPWVYFVSLIILGSFFVLNLVLGVLSGEFSKEREKAKARGDFQKLREKQQLEEDLKGYLDWITQAEDIDPENEEEGGEEGKRNTSMPTSETESVNTENVSGEGENRGCCGSLWCWWRRRGAAKAGPSGCRRWGQAISKSKLSRRWRRWNRFNRRRCRAAVKSVTFYWLVIVLVFLNTLTISSEHYNQPDWLTQIQDIANKVLLALFTCEMLVKMYSLGLQAYFVSLFNRFDCFVVCGGITETILVELEIMSPLGISVFRCVRLLRIFKVTRHWTSLSNLVASLLNSMKSIASLLLLLFLFIIIFSLLGMQLFGGKFNFDETQTKRSTFDNFPQALLTVFQILTGEDWNAVMYDGIMAYGGPSSSGMIVCIYFIILFICGNYILLNVFLAIAVDNLADAESLNTAQKEEAEEKERKKIARKESLENKKNNKPEVNQIANSDNKVTIDDYREEDEDKDPYPPCDVPVGEEEEEEEEDEPEVPAGPRPRRISELNMKEKIAPIPEGSAFFILSKTNPIRVGCHKLINHHIFTNLILVFIMLSSAALAAEDPIRSHSFRNTILGYFDYAFTAIFTVEILLKMTTFGAFLHKGAFCRNYFNLLDMLVVGVSLVSFGIQSSAISVVKILRVLRVLRPLRAINRAKGLKHVVQCVFVAIRTIGNIMIVTTLLQFMFACIGVQLFKGKFYRCTDEAKSNPEECRGLFILYKDGDVDSPVVRERIWQNSDFNFDNVLSAMMALFTVSTFEGWPALLYKAIDSNGENIGPIYNHRVEISIFFIIYIIIVAFFMMNIFVGFVIVTFQEQGEKEYKNCELDKNQRQCVEYALKARPLRRYIPKNPYQYKFWYVVNSSPFEYMMFVLIMLNTLCLAMQHYEQSKMFNDAMDILNMVFTGVFTVEMVLKVIAFKPKGYFSDAWNTFDSLIVIGSIIDVALSEADPTESENVPVPTATPGNSEESNRISITFFRLFRVMRLVKLLSRGEGIRTLLWTFIKSFQALPYVALLIAMLFFIYAVIGMQMFGKVAMRDNNQINRNNNFQTFPQAVLLLFRCATGEAWQEIMLACLPGKLCDPESDYNPGEEYTCGSNFAIVYFISFYMLCAFLIINLFVAVIMDNFDYLTRDWSILGPHHLDEFKRIWSEYDPEAKGRIKHLDVVTLLRRIQPPLGFGKLCPHRVACKRLVAMNMPLNSDGTVMFNATLFALVRTALKIKTEGNLEQANEELRAVIKKIWKKTSMKLLDQVVPPAGDDEVTVGKFYATFLIQDYFRKFKKRKEQGLVGKYPAKNTTIALQAGLRTLHDIGPEIRRAISCDLQDDEPEETKREEEDDVFKRNGALLGNHVNHVNSDRRDSLQQTNTTHRPLHVQRPSIPPASDTEKPLFPPAGNSVCHNHHNHNSIGKQVPTSTNANLNNANMSKAAHGKRPSIGNLEHVSENGHHSSHKHDREPQRRSSVKRTRYYETYIRSDSGDEQLPTICREDPEIHGYFRDPHCLGEQEYFSSEECYEDDSSPTWSRQNYGYYSRYPGRNIDSERPRGYHHPQGFLEDDDSPVCYDSRRSPRRRLLPPTPASHRRSSFNFECLRRQSSQEEVPSSPIFPHRTALPLHLMQQQIMAVAGLDSSKAQKYSPSHSTRSWATPPATPPYRDWTPCYTPLIQVEQSEALDQVNGSLPSLHRSSWYTDEPDISYRTFTPASLTVPSSFRNKNSDKQRSADSLVEAVLISEGLGRYARDPKFVSATKHEIADACDLTIDEMESAASTLLNGNVRPRANGDVGPLSHRQDYELQDFGPGYSDEEPDPGRDEEDLADEMICITTL

SEQ ID NO: 19 - protein, 790 aa, Homo sapiens
MRTYRYFLLLFWVGQPYPTLSTPLSKRTSGFPAKKRALELSGNSKNELNRSKRSWMWNQFFLLEEYTGSDYQYVGKLHSDQDRGDGSLKYILSGDGAGDLFIINENTGDIQATKRLDREEKPVYILRAQAINRRTGRPVEPESEFIIKIHDINDNEPIFTKEVYTATVPEMSDVGTFVVQVTATDADDPTYGNSAKVVYSILQGQPYFSVESETGIIKTALLNMDRENREQYQVVIQAKDMGGQMGGLSGTTTVNITLTDVNDNPPRFPQSTYQFKTPESSPPGTPIGRIKASDADVGENAEIEYSITDGEGLDMFDVITDQETQEGIITVKKLLDFEKKKVYTLKVEASNPYVEPRFLYLGPFKDSATVRIVVEDVDEPPVFSKLAYILQIREDAQINTTIGSVTAQDPDAARNPVKYSVDRHTDMDRIFNIDSGNGSIFTSKLLDRETLLWHNITVIATEINNPKQSSRVPLYIKVLDVNDNAPEFAEFYETFVCEKAKADQLIQTLHAVDKDDPYSGHQFSFSLAPEAASGSNFTIQDNKDNTAGILTRKNGYNRHEMSTYLLPVVISDNDYPVQSSTGTVTVRVCACDHHGNMQSCHAEALIHPTGLSTGALVAILLCIVILLVTVVLFAALRRQRKKEPLIISKEDIRDNIVSYNDEGGGEEDTQAFDIGTLRNPEAIEDNKLRRDIVPEALFLPRRTPTARDNTDVRDFINQRLKENDTDPTAPPYDSLATYAYEGTGSVADSLSSLESVTTDADQDYDYLSDWGPRFKKLADMYGGVDSDKDS

SEQ ID NO: 20 - protein, 423 aa, Homo sapiens
MLPPQKKPWESMAKGLVLGALFTSFLLLVYSYAVPPLHAGLASTTPEAAASCSPPALEPEAVIRANGSAGECQPRRNIVFLKTHKTASSTLLNILFRFGQKHRLKFAFPNGRNDFDYPTFFARSLVQDYRPGACFNIICNHMRFHYDEVRGLVPTNAIFITVLRDPARLFESSFHYFGPVVPLTWKLSAGDKLTEFLQDPDRYYDPNGFNAHYLRNLLFFDLGYDNSLDPSSPQVQEHILEVERRFHLVLLQEYFDESLVLLKDLLCWELEDVLYFKLNARRDSPVPRLSGELYGRATAWNMLDSHLYRHFNASFWRKVEAFGRERMAREVAALRHANERMRTICIDGGHAVDAAAIQDEAMQPWQPLGTKSILGYNLKKSIGQRHAQLCRRMLTPEIQYLMDLGANLWVTKLWKFIRDFLRW

SEQ ID NO: 21 - protein, 875 aa, Homo sapiens
MESTLTLATEQPVKKNTLKKYKIACIVLLALLVIMSLGLGLGLGLRKLEKQGSCRKKCFDASFRGLENCRCDVACKDRGDCCWDFEDTCVESTRIWMCNKFRCGETRLEASLCSCSDDCLQKKDCCADYKSVCQGETSWLEENCDTAQQSQCPEGFDLPPVILFSMDGFRAEYLYTWDTLMPNINKLKTCGIHSKYMRAMYPTKTFPNHYTIVTGLYPESHGIIDNNMYDVNLNKNFSLSSKEQNNPAWWHGQPMWLTAMYQGLKAATYFWPGSEVAINGSFPSIYMPYNGSVPFEERISTLLKWLDLPKAERPRFYTMYFEEPDSSGHAGGPVSARVIKALQVVDHAFGMLMEGLKQRNLHNCVNIILLADHGMDQTYCNKMEYMTDYFPRINFFYMYEGPAPRIRAHNIPHDFFSFNSEEIVRNLSCRKPDQHFKPYLTPDLPKRLHYAKNVRIDKVHLFVDQQWLAVRSKSNTNCGGGNHGYNNEFRSMEAIFLAHGPSFKEKTEVEPFENIEVYNLMCDLLRIQPAPNNGTHGSLNHLLKVPFYEPSHAEEVSKFSVCGFANPLPTESLDCFCPHLQNSTQLEQVNQMLNLTQEEITATVKVNLPFGRPRVLQKNVDHCLLYHREYVSGFGKAMRMPMWSSYTVPQLGDTSPLPPTVPDCLRADVRVPPSESQKCSFYLADKNITHGFLYPPASNRTSDSQYDALITSNLVPMYEEFRKMWDYFHSVLLIKHATERNGVNVVSGPIFDYNYDGHFDAPDEITKHLANTDVPIPTHYFVVLTSCKNKSHTPENCPGWLDVLPFIIPHRPTNVESCPEGKPEALWVEERFTAHIARVRDVELLTGLDFYQDKVQPVSEILQLKTYLPTFETTI

SEQ ID NO: 22 - protein, 445 aa, Homo sapiens
MAAPTPARPVLTHLLVALFGMGSWAAVNGIWVELPVVVKELPEGWSLPSYVSVLVALGNLGLLVVTLWRRLAPGKDEQVPIRVVQVLGMVGTALLASLWHHVAPVAGQLHSVAFLALAFVLALACCASNVTFLPFLSHLPPRFLRSFFLGQGLSALLPCVLALVQGVGRLECPPAPINGTPGPPLDFLERFPASTFFWALTALLVASAAAFQGLLLLLPPPPSVPTGELGSGLQVGAPGAEEEVEESSPLQEPPSQAAGTTPGPDPKAYQLLSARSACLLGLLAATNALTNGVLPAVQSFSCLPYGRLAYHLAVVLGSAANPLACFLAMGVLCRSLAGLGGLSLLGVFCGGYLMALAVLSPCPPLVGTSAGVVLVVLSWVLCLGVFSYVKVAASSLLHGGGRPALLAAGVAIQVGSLLGAVAMFPPTSIYHVFHSRKDCADPCDS

SEQ ID NO: 23 - protein, 750 aa, Homo sapiens
MWNLLHETDSAVATARRPRWLCAGALVLAGGFFLLGFLFGWFIKSSNEATNITPKHNMKAFLDELKAENIKKFLYNFTQIPHLAGTEQNFQLAKQIQSQWKEFGLDSVELAHYDVLLSYPNKTHPNYISIINEDGNEIFNTSLFEPPPPGYENVSDIVPPFSAFSPQGMPEGDLVYVNYARTEDFFKLERDMKINCSGKIVIARYGKVFRGNKVKNAQLAGAKGVILYSDPADYFAPGVKSYPDGWNLPGGGVQRGNILNLNGAGDPLTPGYPANEYAYRRGIAEAVGLPSIPVHPIGYYDAQKLLEKMGGSAPPDSSWRGSLKVPYNVGPGFTGNFSTQKVKMHIHSTNEVTRIYNVIGTLRGAVEPDRYVILGGHRDSWVFGGIDPQSGAAVVHEIVRSFGTLKKEGWRPRRTILFASWDAEEFGLLGSTEWAEENSRLLQERGVAYINADSSIEGNYTLRVDCTPLMYSLVHNLTKELKSPDEGFEGKSLYESWTKKSPSPEFSGMPRISKLGSGNDFEVFFQRLGIASGRARYTKNWETNKFSGYPLYHSVYETYELVEKFYDPMFKYHLTVAQVRGGMVFELANSIVLPFDCRDYAVVLRKYADKIYSISMKHPQEMKTYSVSFDSLFSAVKNFTEIASKFSERLQDFDKSNPIVLRMMNDQLMFLERAFIDPLGLPDRPFYRHVIYAPSSHNKYAGESFPGIYDALFDIESKVDPSKAWGEVKRQIYVAAFTVQAAAETLSEVA

SEQ ID NO: 24 - protein, 398 aa, Homo sapiens
MHTVATSGPNASWGAPANASGCPGCGANASDGPVPSPRAVDAWLVPLFFAALMLLGLVGNSLVIYVICRHKPMRTVTNFYIANLAATDVTFLLCCVPFTALLYPLPGWVLGDFMCKFVNYIQQVSVQATCATLTAMSVDRWYVTVFPLRALHRRTPRLALAVSLSIWVGSAAVSAPVLALHRLSPGPRAYCSEAFPSRALERAFALYNLLALYLLPLLATCACYAAMLRHLGRVAVRPAPADSALQGQVLAERAGAVRAKVSRLVAAVVLLFAACWGPIQLFLVLQALGPAGSWHPRSYAAYALKTWAHCMSYSNSALNPLLYAFLGSHFRQAFRRVCPCAPRRPRRPRRPGPSDPAAPHAELHRLGSHPAPARAQKPGSSGLAARGLCVLGEDNAPL

SEQ ID NO: 25 - protein, 359 aa, Homo sapiens
MHPQVVILSLILHLADSVAGSVKVGGEAGPSVTLPCHYSGAVTSMCWNRGSCSLFTCQNGIVWTNGTHVTYRKDTRYKLLGDLSRRDVSLTIENTAVSDSGVYCCRVEHRGWFNDMKITVSLEIVPPKVTTTPIVTTVPTVTTVRTSTTVPTTTTVPTTTVPTTMSIPTTTTVPTTMTVSTTTSVPTTTSIPTTTSVPVTTTVSTFVPPMPLPRQNHEPVATSPSSPQPAETHPTTLQGAIRREPTSSPLYSYTTDGNDTVTESSDGLWNNNQTQLFLEHSLLTANTTKGIYAGVCISVLVLLALLGVIIAKKYFFKKEVQQLSVSFSSLQIKALQNAVEKEVQAEDNIYIENSLYATD

SEQ ID NO: 26 - protein, 320 aa, Homo sapiens
MSSCNFTHATFVLIGIPGLEKAHFWVGFPLLSMYVVAMFGNCIVVFIVRTERSLHAPMYLFLCMLAAIDLALSTSTMPKILALFWFDSREISFEACLTQMFFIHALSAIESTILLAMAFDRYVAICHPLRHAAVLNNTVTAQIGIVAVVRGSLFFFPLPLLIKRLAFCHSNVLSHSYCVHQDVMKLAYADTLPNVVYGLTAILLVMGVDVMFISLSYFLIIRTVLQLPSKSERAKAFGTCVSHIGVVLAFYVPLIGLSVVHRFGNSLHPIVRVVMGDIYLLLPPVINPIIYGAKTKQIRTRVLAMFKISCDKDLQAVGGK

SEQ ID NO: 27 - protein, 620 aa, Homo sapiens
MSKSKCSVGLMSSVVAPAKEPNAVGPKEVELILVKEQNGVQLTSSTLTNPRQSPVEAQDRETWGKKIDFLLSVIGFAVDLANVWRFPYLCYKNGGGAFLVPYLLFMVIAGMPLFYMELALGQFNREGAAGVWKICPILKGVGFTVILISLYVGFFYNVIIAWALHYLFSSFTTELPWIHCNNSWNSPNCSDAHPGDSSGDSSGLNDTFGTTPAAEYFERGVLHLHQSHGIDDLGPPRWQLTACLVLVIVLLYFSLWKGVKTSGKVVWITATMPYVVLTALLLRGVTLPGAIDGIRAYLSVDFYRLCEASVWIDAATQVCFSLGVGFGVLIAFSSYNKFTNNCYRDAIVTTSINSLTSFSSGFVVFSFLGYMAQKHSVPIGDVAKDGPGLIFIIYPEAIATLPLSSAWAVVFFIMLLTLGIDSAMGGMESVITGLIDEFQLLHRHRELFTLFIVLATFLLSLFCVTNGGIYVFTLLDHFAAGTSILFGVLIEAIGVAWFYGVGQFSDDIQQMTGQRPSLYWRLCWKLVSPCFLLFVVVVSIVTFRPPHYGAYIFPDWANALGWVIATSSMAMVPIYAAYKFCSLPGSFREKLAYAIAPEKDRELVDRGEVRQFTLRHWLKV

SEQ ID NO: 28 - protein, 429 aa, Homo sapiens
MAGSGAWKRLKSMLRKDDAPLFLNDTSAFDFSDEAGDEGLSRFNKLRVVVADDGSEAPERPVNGAHPTLQADDDSLLDQDLPLTNSQLSLKVDSCDNCSKQREILKQRKVKARLTIAAVLYLLFMIGELVGGYIANSLAIMTDALHMLTDLSAIILTLLALWLSSKSPTKRFTFGFHRLEVLSAMISVLLVYILMGFLLYEAVQRTIHMNYEINGDIMLITAAVGVAVNVIMGFLLNQSGHRHSHSHSLPSNSPTRGSGCERNHGQDSLAVRAAFVHALGDLVQSVGVLIAAYIIRFKPEYKIADPICTYVFSLLVAFTTFRIIWDTVVIILEGVPSHLNVDYIKEALMKIEDVYSVEDLNIWSLTSGKSTAIVHIQLIPGSSSKWEEVQSKANHLLLNTFGMYRCTIQLQSYRQEVDRTCANCQSSSP

SEQ ID NO: 29 - protein, 338 aa, Homo sapiens [sequence omitted]

SEQ ID NO: 30 - protein, 1214 aa, Homo sapiens
MVVPEKEQSWIPKIFKKKTCTTFIVDSTDPGGTLCQCGRPRTAHPAVAMEDAFGAAVVTVWDSDAHTTEKPTDAYGELDFTGAGRKHSNFLRLSDRTDPAAVYSLVTRTWGFRAPNLVVSVLGGSGGPVLQTWLQDLLRRGLVRAAQSTGAWIVTGGLHTGIGRHVGVAVRDHQMASTGGTKVVAMGVAPWGVVRNRDTLINPKGSFPARYRWRGDPEDGVQFPLDYNYSAFFLVDDGTHGCLGGENRFRLRLESYISQQKTGVGGTGIDIPVLLLLIDGDEKMLTRIENATQAQLPCLLVAGSGGAADCLAETLEDTLAPGSGGARQGEARDRIRRFFPKGDLEVLQAQVERIMTRKELLTVYSSEDGSEEFETIVLKALVKACGSSEASAYLDELRLAVAWNRVDIAQSELFRGDIQWRSFHLEASLMDALLNDRPEFVRLLISHGLSLGHFLTPMRLAQLYSAAPSNSLIRNLLDQASHSAGTKAPALKGGAAELRPPDVGHVLRMLLGKMCAPRYPSGGAWDPHPGQGFGESMYLLSDKATSPLSLDAGLGQAPWSDLLLWALLLNRAQMAMYFWEMGSNAVSSALGACLLLRVMARLEPDAEEAARRKDLAFKFEGMGVDLFGECYRSSEVRAARLLLRRCPLWGDATCLQLAMQADARAFFAQDGVQSLLTQKWWGDMASTTPIWALVLAFFCPPLIYTRLITFRKSEEEPTREELEFDMDSVINGEGPVGTADPAEKTPLGVPRQSGRPGCCGGRCGGRRCLRRWFHFWGAPVTIFMGNVVSYLLFLLLFSRVLLVDFQPAPPGSLELLLYFWAFTLLCEELRQGLSGGGGSLASGGPGPGHASLSQRLRLYLADSWNQCDLVALTCFLLGVGCRLTPGLYHLGRTVLCIDFMVFTVRLLHIFTVNKQLGPKIVIVSKMMKDVFFFLFFLGVWLVAYGVATEGLLRPRDSDFPSILRRVFYRPYLQIFGQIPQEDMDVALMEHSNCSSEPGFWAHPPGAQAGTCVSQYANWLVVLLLVIFLLVANILLVNLLIAMFSYTFGKVQGNSDLYWKAQRYRLIREFHSRPALAPPFIVISHLRLLLRQLCRRPRSPQPSSPALEHFRVYLSKEAERKLLTWESVHKENFLLARARDKRESDSERLKRTSQKVDLALKQLGHIREYEQRLKVLEREVQQCSRVLGWVAEALSRSALLPPGGPPPPDLPGSKD

SEQ ID NO: 31 - DNA, 21 bp, Homo sapiens
aacatctgctcacgcgtgttc

SEQ ID NO: 32 - RNA, 21 nt, RNAi-sense strand
caucugcucacgcguguucuu

SEQ ID NO: 33 - RNA, 21 nt, RNAi-antisense strand
gaacacgcgugagcagauguu

SEQ ID NO: 34 - DNA, 21 bp, Homo sapiens
aaattggccataaacggagat

SEQ ID NO: 35 - RNA, 21 nt, RNAi-sense strand
auuggccauaaacggagauuu

SEQ ID NO: 36 - RNA, 21 nt, RNAi-antisense strand
aucuccguuuauggccaauuu

SEQ ID NO: 37 - DNA, 21 bp, Homo sapiens
aattggccataaacggagatt

SEQ ID NO: 38 - RNA, 21 nt, RNAi-sense strand
uuggccauaaacggagauuuu

SEQ ID NO: 39 - RNA, 21 nt, RNAi-antisense strand
aaucuccguuuauggccaauu

SEQ ID NO: 40 - DNA, 21 bp, Homo sapiens
aaacggagattagaggaagat

SEQ ID NO: 41 - RNA, 21 nt, RNAi-sense strand
acggagauuagaggaagauuu

SEQ ID NO: 42 - RNA, 21 nt, RNAi-antisense strand
aucuuccucuaaucuccguuu

SEQ ID NO: 43 - DNA, 21 bp, Homo sapiens
aacggagattagaggaagatg

SEQ ID NO: 44 - RNA, 21 nt, RNAi-sense strand
cggagauuagaggaagauguu

SEQ ID NO: 45 - RNA, 21 nt, RNAi-antisense strand
caucuuccucuaaucuccguu

SEQ ID NO: 46 - DNA, 21 bp, Homo sapiens
aagatgatatgtattcagtgc

SEQ ID NO: 47 - RNA, 21 nt, RNAi-sense strand
gaugauauguauucagugcuu

SEQ ID NO: 48 - RNA, 21 nt, RNAi-antisense strand
gcacugaauacauaucaucuu

SEQ ID NO: 49 - DNA, 21 bp, Homo sapiens
aagaccgctcacagcaccttg

SEQ ID NO: 50 - RNA, 21 nt, RNAi-sense strand
gaccgcucacagcaccuuguu

SEQ ID NO: 51 - RNA, 21 nt, RNAi-antisense strand
caaggugcugugagcggucuu

SEQ ID NO: 52 - DNA, 21 bp, Homo sapiens
aagagctgagaatgacgcaca

SEQ ID NO: 53 - RNA, 21 nt, RNAi-sense strand
gagcugagaaugacgcacauu

SEQ ID NO: 54 - RNA, 21 nt, RNAi-antisense strand
ugugcgucauucucagcucuu

SEQ ID NO: 55 - DNA, 21 bp, Homo sapiens
aatgacgcacagaagccttct

SEQ ID NO: 56 - RNA, 21 nt, RNAi-sense strand
ugacgcacagaagccuucuuu

SEQ ID NO: 57 - RNA, 21 nt, RNAi-antisense strand
agaaggcuucugugcgucauu

SEQ ID NO: 58 - DNA, 21 bp, Homo sapiens
aagccttctttaacaagagca

SEQ ID NO: 59 - RNA, 21 nt, RNAi-sense strand
gccuucuuuaacaagagcauu

SEQ ID NO: 60 - RNA, 21 nt, RNAi-antisense strand
ugcucuuguuaaagaaggcuu

SEQ ID NO: 61 - DNA, 21 bp, Homo sapiens
aacaagagcaatcataaagtg

SEQ ID NO: 62 - RNA, 21 nt, RNAi-sense strand
caagagcaaucauaaaguguu

SEQ ID NO: 63 - RNA, 21 nt, RNAi-antisense strand
cacuuuaugauugcucuuguu

SEQ ID NO: 64 - DNA, 21 bp, Homo sapiens
aattgaggaaagtgccaaagt

SEQ ID NO: 65 - RNA, 21 nt, RNAi-sense strand
uugaggaaagugccaaaguuu

SEQ ID NO: 66 - RNA, 21 nt, RNAi-antisense strand
acuuuggcacuuuccucaauu

SEQ ID NO: 67 - DNA, 21 bp, Homo sapiens
aaagtgccaaagtaatccagc

SEQ ID NO: 68 - RNA, 21 nt, RNAi-sense strand
agugccaaaguaauccagcuu

SEQ ID NO: 69 - RNA, 21 nt, RNAi-antisense strand
gcuggauuacuuuggcacuuu

SEQ ID NO: 70 - DNA, 21 bp, Homo sapiens
aagtgccaaagtaatccagcc

SEQ ID NO: 71 - RNA, 21 nt, RNAi-sense strand
gugccaaaguaauccagccuu

SEQ ID NO: 72 - RNA, 21 nt, RNAi-antisense strand
ggcuggauuacuuuggcacuu

SEQ ID NO: 73 - DNA, 21 bp, Homo sapiens
aacacagcgtacgcctatgcc

SEQ ID NO: 74 - RNA, 21 nt, RNAi-sense strand
cacagcguacgccuaugccuu

SEQ ID NO: 75 - RNA, 21 nt, RNAi-antisense strand
ggcauaggcguacgcuguguu

SEQ ID NO: 76 - DNA, 21 bp, Homo sapiens
aaggcacttcgtcttagtaac

SEQ ID NO: 77 - RNA, 21 nt, RNAi-sense strand
ggcacuucgucuuaguaacuu

SEQ ID NO: 78 - RNA, 21 nt, RNAi-antisense strand
guuacuaagacgaagugccuu

SEQ ID NO: 79 - DNA, 21 bp, Homo sapiens
aagacaaccacaggccagata

SEQ ID NO: 80 - RNA, 21 nt, RNAi-sense strand
gacaaccacaggccagauauu

SEQ ID NO: 81 - RNA, 21 nt, RNAi-antisense strand
uaucuggccugugguugucuu

SEQ ID NO: 82 - DNA, 21 bp, Homo sapiens
aaccacaggccagatagtcaa

SEQ ID NO: 83 - RNA, 21 nt, RNAi-sense strand
ccacaggccagauagucaauu

SEQ ID NO: 84 - RNA, 21 nt, RNAi-antisense strand
uugacuaucuggccugugguu

SEQ ID NO: 85 - DNA, 21 bp, Homo sapiens
aatctgctgtccaatgatgtg

SEQ ID NO: 86 - RNA, 21 nt, RNAi-sense strand
ucugcuguccaaugauguguu

SEQ ID NO: 87 - RNA, 21 nt, RNAi-antisense strand
cacaucauuggacagcagauu

SEQ ID NO: 88 - DNA, 21 bp, Homo sapiens
aacaagtttgatcaggtgaca

SEQ ID NO: 89 - RNA, 21 nt, RNAi-sense strand
caaguuugaucaggugacauu

SEQ ID NO: 90 - RNA, 21 nt, RNAi-antisense strand
ugucaccugaucaaacuuguu

SEQ ID NO: 91 - DNA, 21 bp, Homo sapiens
aagtttgatcaggtgacagtg

SEQ ID NO: 92 - RNA, 21 nt, RNAi-sense strand
guuugaucaggugacaguguu

SEQ ID NO: 93 - RNA, 21 nt, RNAi-antisense strand
cacugucaccugaucaaacuu

SEQ ID NO: 94 - DNA, 21 bp, Homo sapiens
aagttgttctcatcactgagg

SEQ ID NO: 95 - RNA, 21 nt, RNAi-sense strand
guuguucucaucacugagguu

SEQ ID NO: 96 - RNA, 21 nt, RNAi-antisense strand
ccucagugaugagaacaacuu

SEQ ID NO: 97 - DNA, 21 bp, Homo sapiens
aaactgcaactttcacggatg

SEQ ID NO: 98 - RNA, 21 nt, RNAi-sense strand
acugcaacuuucacggauguu

SEQ ID NO: 99 - RNA, 21 nt, RNAi-antisense strand
cauccgugaaaguugcaguuu

SEQ ID NO: 100 - DNA, 21 bp, Homo sapiens
aactgcaactttcacggatgc

SEQ ID NO: 101 - RNA, 21 nt, RNAi-sense strand
cugcaacuuucacggaugcuu

SEQ ID NO: 102 - RNA, 21 nt, RNAi-antisense strand
gcauccgugaaaguugcaguu

SEQ ID NO: 103 - DNA, 21 bp, Homo sapiens
aactttcacggatgccaggat

SEQ ID NO: 104 - RNA, 21 nt, RNAi-sense strand
cuuucacggaugccaggauuu

SEQ ID NO: 105 - RNA, 21 nt, RNAi-antisense strand
auccuggcauccgugaaaguu

SEQ ID NO: 106 - DNA, 21 bp, Homo sapiens
aaagaaggagatttccaagat

SEQ ID NO: 107 - RNA, 21 nt, RNAi-sense strand
agaaggagauuuccaagauuu

SEQ ID NO: 108 - RNA, 21 nt, RNAi-antisense strand
aucuuggaaaucuccuucuuu

SEQ ID NO: 109 - DNA, 21 bp, Homo sapiens
aagaaggagatttccaagatt

SEQ ID NO: 110 - RNA, 21 nt, RNAi-sense strand
gaaggagauuuccaagauuuu

SEQ ID NO: 111 - RNA, 21 nt, RNAi-antisense strand
aaucuuggaaaucuccuucuu

SEQ ID NO: 112 - DNA, 21 bp, Homo sapiens
aaggagatttccaagattctg

SEQ ID NO: 113 - RNA, 21 nt, RNAi-sense strand
ggagauuuccaagauucuguu

SEQ ID NO: 114 - RNA, 21 nt, RNAi-antisense strand
cagaaucuuggaaaucuccuu

SEQ ID NO: 115 - DNA, 21 bp, Homo sapiens
aagattctgagaagttcctgc

SEQ ID NO: 116 - RNA, 21 nt, RNAi-sense strand
gauucugagaaguuccugcuu

SEQ ID NO: 117 - RNA, 21 nt, RNAi-antisense strand
gcaggaacuucucagaaucuu

SEQ ID NO: 118 - DNA, 21 bp, Homo sapiens
aaatcatcgtgtttgtgacct

SEQ ID NO: 119 - RNA, 21 nt, RNAi-sense strand
aucaucguguuugugaccuuu

SEQ ID NO: 120 - RNA, 21 nt, RNAi-antisense strand
aggucacaaacacgaugauuu

SEQ ID NO: 121 - DNA, 21 bp, Homo sapiens
aatcatcgtgtttgtgacctt

SEQ ID NO: 122 - RNA, 21 nt, RNAi-sense strand
ucaucguguuugugaccuuuu

SEQ ID NO: 123 - RNA, 21 nt, RNAi-antisense strand
aaggucacaaacacgaugauu

SEQ ID NO: 124 - DNA, 21 bp, Homo sapiens
aatcgtcagcatccgaagaat

SEQ ID NO: 125 - RNA, 21 nt, RNAi-sense strand
ucgucagcauccgaagaauuu

SEQ ID NO: 126 - RNA, 21 nt, RNAi-antisense strand
auucuucggaugcugacgauu

SEQ ID NO: 127 - DNA, 21 bp, Homo sapiens
aaccgtcagctgccgtcagat

SEQ ID NO: 128 - RNA, 21 nt, RNAi-sense strand
ccgucagcugccgucagauuu

SEQ ID NO: 129 - RNA, 21 nt, RNAi-antisense strand
aucugacggcagcugacgguu

SEQ ID NO: 130 - DNA, 21 bp, Homo sapiens
aaagatggtgcatgtgcagga

SEQ ID NO: 131 - RNA, 21 nt, RNAi-sense strand
agauggugcaugugcaggauu

SEQ ID NO: 132 - RNA, 21 nt, RNAi-antisense strand
uccugcacaugcaccaucuuu

SEQ ID NO: 133 - DNA, 21 bp, Homo sapiens
aagatggtgcatgtgcaggat

SEQ ID NO: 134 - RNA, 21 nt, RNAi-sense strand
gauggugcaugugcaggauuu

SEQ ID NO: 135 - RNA, 21 nt, RNAi-antisense strand
auccugcacaugcaccaucuu

SEQ ID NO: 136 - DNA, 21 bp, Homo sapiens
aactctacaaggcctttcctt

SEQ ID NO: 137 - RNA, 21 nt, RNAi-sense strand
cucuacaaggccuuuccuuuu

SEQ ID NO: 138 - RNA, 21 nt, RNAi-antisense strand
aaggaaaggccuuguagaguu

SEQ ID NO: 139 - DNA, 21 bp, Homo sapiens
aaggcctttcctttactgtca

SEQ ID NO: 140 - RNA, 21 nt, RNAi-sense strand
ggccuuuccuuuacugucauu

SEQ ID NO: 141 - RNA, 21 nt, RNAi-antisense strand
ugacaguaaaggaaaggccuu

SEQ ID NO: 142 - DNA, 21 bp, Homo sapiens
aattgttagctgtggtcggcc

SEQ ID NO: 143 - RNA, 21 nt, RNAi-sense strand
uuguuagcuguggucggccuu

SEQ ID NO: 144 - RNA, 21 nt, RNAi-antisense strand
ggccgaccacagcuaacaauu

SEQ ID NO: 145 - DNA, 21 bp, Homo sapiens
aagtcatcactgttaagtgcc

SEQ ID NO: 146 - RNA, 21 nt, RNAi-sense strand
gucaucacuguuaagugccuu

SEQ ID NO: 147 - RNA, 21 nt, RNAi-antisense strand
ggcacuuaacagugaugacuu

SEQ ID NO: 148 - DNA, 21 bp, Homo sapiens
aagaattgcctatgtgtctca

SEQ ID NO: 149 - RNA, 21 nt, RNAi-sense strand
gaauugccuaugugucucauu

SEQ ID NO: 150 - RNA, 21 nt, RNAi-antisense strand
ugagacacauaggcaauucuu

SEQ ID NO: 151 - DNA, 21 bp, Homo sapiens
aattgcctatgtgtctcagca

SEQ ID NO: 152 - RNA, 21 nt, RNAi-sense strand
uugccuaugugucucagcauu

SEQ ID NO: 153 - RNA, 21 nt, RNAi-antisense strand
ugcugagacacauaggcaauu

SEQ ID NO: 154 - DNA, 21 bp, Homo sapiens
aaagtcataaaggcttgtgct

SEQ ID NO: 155 - RNA, 21 nt, RNAi-sense strand
agucauaaaggcuugugcuuu

SEQ ID NO: 156 - RNA, 21 nt, RNAi-antisense strand
agcacaagccuuuaugacuuu

SEQ ID NO: 157 - DNA, 21 bp, Homo sapiens
aagtcataaaggcttgtgctc

SEQ ID NO: 158 - RNA, 21 nt, RNAi-sense strand
gucauaaaggcuugugcucuu

SEQ ID NO: 159 - RNA, 21 nt, RNAi-antisense strand
gagcacaagccuuuaugacuu

SEQ ID NO: 160 - DNA, 21 bp, Homo sapiens
aaaggatttacagctgttgga

SEQ ID NO: 161 - RNA, 21 nt, RNAi-sense strand
aggauuuacagcuguuggauu

SEQ ID NO: 162 - RNA, 21 nt, RNAi-antisense strand
uccaacagcuguaaauccuuu

SEQ ID NO: 163 - DNA, 21 bp, Homo sapiens
aaggatttacagctgttggag

SEQ ID NO: 164 - RNA, 21 nt, RNAi-sense strand
ggauuuacagcuguuggaguu

SEQ ID NO: 165 - RNA, 21 nt, RNAi-antisense strand
cuccaacagcuguaaauccuu

SEQ ID NO: 166 - DNA, 21 bp, Homo sapiens
aaaccttgcaagagcagtgta

SEQ ID NO: 167 - RNA, 21 nt, RNAi-sense strand
accuugcaagagcaguguauu

SEQ ID NO: 168 - RNA, 21 nt, RNAi-antisense strand
uacacugcucuugcaagguuu

SEQ ID NO: 169 - DNA, 21 bp, Homo sapiens
aaccttgcaagagcagtgtat

SEQ ID NO: 170 - RNA, 21 nt, RNAi-sense strand
ccuugcaagagcaguguauuu

SEQ ID NO: 171 - RNA, 21 nt, RNAi-antisense strand
auacacugcucuugcaagguu

SEQ ID NO: 172 - DNA, 21 bp, Homo sapiens
aagagcagtgtatcaagatgc

SEQ ID NO: 173 - RNA, 21 nt, RNAi-sense strand
gagcaguguaucaagaugcuu

SEQ ID NO: 174 - RNA, 21 nt, RNAi-antisense strand
gcaucuugauacacugcucuu

SEQ ID NO: 175 - DNA, 21 bp, Homo sapiens
aagatgctgacatctatctcc

SEQ ID NO: 176 - RNA, 21 nt, RNAi-sense strand
gaugcugacaucuaucuccuu

SEQ ID NO: 177 - RNA, 21 nt, RNAi-antisense strand
ggagauagaugucagcaucuu

SEQ ID NO: 178 - DNA, 21 bp, Homo sapiens
aagttagcagacacttgttcg

SEQ ID NO: 179 - RNA, 21 nt, RNAi-sense strand
guuagcagacacuuguucguu

SEQ ID NO: 180 - RNA, 21 nt, RNAi-antisense strand
cgaacaagugucugcuaacuu

SEQ ID NO: 181 - DNA, 21 bp, Homo sapiens
aaagctgcaagtcagattctg

SEQ ID NO: 182 - RNA, 21 nt, RNAi-sense strand
agcugcaagucagauucuguu

SEQ ID NO: 183 - RNA, 21 nt, RNAi-antisense strand
cagaaucugacuugcagcuuu

SEQ ID NO: 184 - DNA, 21 bp, Homo sapiens
aagctgcaagtcagattctga

SEQ ID NO: 185 - RNA, 21 nt, RNAi-sense strand
gcugcaagucagauucugauu

SEQ ID NO: 186 - RNA, 21 nt, RNAi-antisense strand
ucagaaucugacuugcagcuu

SEQ ID NO: 187 - DNA, 21 bp, Homo sapiens
aaagaaggataatgaggaaag

SEQ ID NO: 188 - RNA, 21 nt, RNAi-sense strand
agaaggauaaugaggaaaguu

SEQ ID NO: 189 - RNA, 21 nt, RNAi-antisense strand
cuuuccucauuauccuucuuu

SEQ ID NO: 190 - DNA, 21 bp, Homo sapiens
aagaaggataatgaggaaagt

SEQ ID NO: 191 - RNA, 21 nt, RNAi-sense strand
gaaggauaaugaggaaaguuu

SEQ ID NO: 192 - RNA, 21 nt, RNAi-antisense strand
acuuuccucauuauccuucuu

SEQ ID NO: 193 - DNA, 21 bp, Homo sapiens
aaggataatgaggaaagtgaa

SEQ ID NO: 194 - RNA, 21 nt, RNAi-sense strand
ggauaaugaggaaagugaauu

SEQ ID NO: 195 - RNA, 21 nt, RNAi-antisense strand
uucacuuuccucauuauccuu

SEQ ID NO: 196 - DNA, 21 bp, Homo sapiens
aatgaggaaagtgaacaacct

SEQ ID NO: 197 - RNA, 21 nt, RNAi-sense strand
ugaggaaagugaacaaccuuu

SEQ ID NO: 198 - RNA, 21 nt, RNAi-antisense strand
agguuguucacuuuccucauu

SEQ ID NO: 199 - DNA, 21 bp, Homo sapiens
aaagtgaacaacctccagttc

SEQ ID NO: 200 - RNA, 21 nt, RNAi-sense strand
agugaacaaccuccaguucuu

SEQ ID NO: 201 - RNA, 21 nt, RNAi-antisense strand
gaacuggagguuguucacuuu

SEQ ID NO: 202 - DNA, 21 bp, Homo sapiens
aagtgaacaacctccagttcc

SEQ ID NO: 203 - RNA, 21 nt, RNAi-sense strand
gugaacaaccuccaguuccuu

SEQ ID NO: 204 - RNA, 21 nt, RNAi-antisense strand
ggaacuggagguuguucacuu

SEQ ID NO: 205 - DNA, 21 bp, Homo sapiens
aacaacctccagttccaggaa

SEQ ID NO: 206 - RNA, 21 nt, RNAi-sense strand
caaccuccaguuccaggaauu

SEQ ID NO: 207 - RNA, 21 nt, RNAi-antisense strand
uuccuggaacuggagguuguu

SEQ ID NO: 208 - DNA, 21 bp, Homo sapiens
aacctccagttccaggaactc

SEQ ID NO: 209 - RNA, 21 nt, RNAi-sense strand
ccuccaguuccaggaacucuu

SEQ ID NO: 210 - RNA, 21 nt, RNAi-antisense strand
gaguuccuggaacuggagguu

SEQ ID NO: 211 - DNA, 21 bp, Homo sapiens
aaggaatcgtaccttctcaga

SEQ ID NO: 212 - RNA, 21 nt, RNAi-sense strand
ggaaucguaccuucucagauu

SEQ ID NO: 213 - RNA, 21 nt, RNAi-antisense strand
ucugagaagguacgauuccuu

SEQ ID NO: 214 - DNA, 21 bp, Homo sapiens
aatcgtaccttctcagagtct

SEQ ID NO: 215 - RNA, 21 nt, RNAi-sense strand
ucguaccuucucagagucuuu

SEQ ID NO: 216 - RNA, 21 nt, RNAi-antisense strand
agacucugagaagguacgauu

SEQ ID NO: 217 - DNA, 21 bp, Homo sapiens
aaagatggtgctctggagagc

SEQ ID NO: 218 - RNA, 21 nt, RNAi-sense strand
agauggugcucuggagagcuu

SEQ ID NO: 219 - RNA, 21 nt, RNAi-antisense strand
gcucuccagagcaccaucuuu

SEQ ID NO: 220 - DNA, 21 bp, Homo sapiens
aagatggtgctctggagagcc

SEQ ID NO: 221 - RNA, 21 nt, RNAi-sense strand
gauggugcucuggagagccuu

SEQ ID NO: 222 - RNA, 21 nt, RNAi-antisense strand
ggcucuccagagcaccaucuu

SEQ ID NO: 223 - DNA, 21 bp, Homo sapiens
aagaattacttcagagctggt

SEQ ID NO: 224 - RNA, 21 nt, RNAi-sense strand
gaauuacuucagagcugguuu

SEQ ID NO: 225 - RNA, 21 nt, RNAi-antisense strand
accagcucugaaguaauucuu

SEQ ID NO: 226 - DNA, 21 bp, Homo sapiens
aattacttcagagctggtgct

SEQ ID NO: 227 - RNA, 21 nt, RNAi-sense strand
uuacuucagagcuggugcuuu

SEQ ID NO: 228 - RNA, 21 nt, RNAi-antisense strand
agcaccagcucugaaguaauu

SEQ ID NO: 229 - DNA, 21 bp, Homo sapiens
aaacactgcagctcaggttgc

SEQ ID NO: 230 - RNA, 21 nt, RNAi-sense strand
acacugcagcucagguugcuu

SEQ ID NO: 231 - RNA, 21 nt, RNAi-antisense strand
gcaaccugagcugcaguguuu

SEQ ID NO: 232 - DNA, 21 bp, Homo sapiens
aacactgcagctcaggttgcc

SEQ ID NO: 233 - RNA, 21 nt, RNAi-sense strand
cacugcagcucagguugccuu

SEQ ID NO: 234 - RNA, 21 nt, RNAi-antisense strand
ggcaaccugagcugcaguguu

SEQ ID NO: 235 - DNA, 21 bp, Homo sapiens
aagattggtggctttcatact

SEQ ID NO: 236 - RNA, 21 nt, RNAi-sense strand
gauugguggcuuucauacuuu

SEQ ID NO: 237 - RNA, 21 nt, RNAi-antisense strand
aguaugaaagccaccaaucuu

SEQ ID NO: 238 - DNA, 21 bp, Homo sapiens
aaagtatgctaaatgtcactg

SEQ ID NO: 239 - RNA, 21 nt, RNAi-sense strand
aguaugcuaaaugucacuguu

SEQ ID NO: 240 - RNA, 21 nt, RNAi-antisense strand
cagugacauuuagcauacuuu

SEQ ID NO: 241 - DNA, 21 bp, Homo sapiens
aagtatgctaaatgtcactgt

SEQ ID NO: 242 - RNA, 21 nt, RNAi-sense strand
guaugcuaaaugucacuguuu

SEQ ID NO: 243 - RNA, 21 nt, RNAi-antisense strand
acagugacauuuagcauacuu

SEQ ID NO: 244 - DNA, 21 bp, Homo sapiens
aaatgtcactgtaaatggagg

SEQ ID NO: 245 - RNA, 21 nt, RNAi-sense strand
augucacuguaaauggagguu

SEQ ID NO: 246 - RNA, 21 nt, RNAi-antisense strand
ccuccauuuacagugacauuu

SEQ ID NO: 247 - DNA, 21 bp, Homo sapiens
aatgtcactgtaaatggagga

SEQ ID NO: 248 - RNA, 21 nt, RNAi-sense strand
ugucacuguaaauggaggauu

SEQ ID NO: 249 - RNA, 21 nt, RNAi-antisense strand
uccuccauuuacagugacauu

SEQ ID NO: 250 - DNA, 21 bp, Homo sapiens
aaatggaggaggaaatgtaac

SEQ ID NO: 251 - RNA, 21 nt, RNAi-sense strand
auggaggaggaaauguaacuu

SEQ ID NO: 252 - RNA, 21 nt, RNAi-antisense strand
guuacauuuccuccuccauuu

SEQ ID NO: 253 - DNA, 21 bp, Homo sapiens
aatggaggaggaaatgtaacc

SEQ ID NO: 254 - RNA, 21 nt, RNAi-sense strand
uggaggaggaaauguaaccuu

SEQ ID NO: 255 - RNA, 21 nt, RNAi-antisense strand
gguuacauuuccuccuccauu

SEQ ID NO: 256 - DNA, 21 bp, Homo sapiens
aaatgtaaccgagaagctaga

SEQ ID NO: 257 - RNA, 21 nt, RNAi-sense strand
auguaaccgagaagcuagauu

SEQ ID NO: 258 - RNA, 21 nt, RNAi-antisense strand
ucuagcuucucgguuacauuu

SEQ ID NO: 259 - DNA, 21 bp, Homo sapiens
aatgtaaccgagaagctagat

SEQ ID NO: 260 - RNA, 21 nt, RNAi-sense strand
uguaaccgagaagcuagauuu

SEQ ID NO: 261 - RNA, 21 nt, RNAi-antisense strand
aucuagcuucucgguuacauu

SEQ ID NO: 262 - DNA, 21 bp, Homo sapiens
aaccgagaagctagatcttaa

SEQ ID NO: 263 - RNA, 21 nt, RNAi-sense strand
ccgagaagcuagaucuuaauu

SEQ ID NO: 264 - RNA, 21 nt, RNAi-antisense strand
uuaagaucuagcuucucgguu

SEQ ID NO: 265 - DNA, 21 bp, Homo sapiens
aagctagatcttaactggtac

SEQ ID NO: 266 - RNA, 21 nt, RNAi-sense strand
gcuagaucuuaacugguacuu

SEQ ID NO: 267 - RNA, 21 nt, RNAi-antisense strand
guaccaguuaagaucuagcuu

SEQ ID NO: 268 - DNA, 21 bp, Homo sapiens
aactcttcacaaactttgcac

SEQ ID NO: 269 - RNA, 21 nt, RNAi-sense strand
cucuucacaaacuuugcacuu

SEQ ID NO: 270 - RNA, 21 nt, RNAi-antisense strand
gugcaaaguuugugaagaguu

SEQ ID NO: 271 - DNA, 21 bp, Homo sapiens
aattctgaaagctccggtatt

SEQ ID NO: 272 - RNA, 21 nt, RNAi-sense strand
uucugaaagcuccgguauuuu

SEQ ID NO: 273 - RNA, 21 nt, RNAi-antisense strand
aauaccggagcuuucagaauu

SEQ ID NO: 274 - DNA, 21 bp, Homo sapiens
aaagctccggtattattcttt

SEQ ID NO: 275 - RNA, 21 nt, RNAi-sense strand
agcuccgguauuauucuuuuu

SEQ ID NO: 276 - RNA, 21 nt, RNAi-antisense strand
aaagaauaauaccggagcuuu

SEQ ID NO: 277 - DNA, 21 bp, Homo sapiens
aagctccggtattattctttg

SEQ ID NO: 278 - RNA, 21 nt, RNAi-sense strand
gcuccgguauuauucuuuguu

SEQ ID NO: 279 - RNA, 21 nt, RNAi-antisense strand
caaagaauaauaccggagcuu

SEQ ID NO: 280 - DNA, 21 bp, Homo sapiens
aaatcgtttctccaaagacat

SEQ ID NO: 281 - RNA, 21 nt, RNAi-sense strand
aucguuucuccaaagacauuu

SEQ ID NO: 282 - RNA, 21 nt, RNAi-antisense strand
augucuuuggagaaacgauuu

SEQ ID NO: 283 - DNA, 21 bp, Homo sapiens
aatcgtttctccaaagacatt

SEQ ID NO: 284 - RNA, 21 nt, RNAi-sense strand
ucguuucuccaaagacauuuu

SEQ ID NO: 285 - RNA, 21 nt, RNAi-antisense strand
aaugucuuuggagaaacgauu

SEQ ID NO: 286 - DNA, 21 bp, Homo sapiens
aaagacattggacacttggat

SEQ ID NO: 287 - RNA, 21 nt, RNAi-sense strand
agacauuggacacuuggauuu

SEQ ID NO: 288 - RNA, 21 nt, RNAi-antisense strand
auccaaguguccaaugucuuu

SEQ ID NO: 289 - DNA, 21 bp, Homo sapiens
aagacattggacacttggatg

SEQ ID NO: 290 - RNA, 21 nt, RNAi-sense strand
gacauuggacacuuggauguu

SEQ ID NO: 291 - RNA, 21 nt, RNAi-antisense strand
cauccaaguguccaaugucuu

SEQ ID NO: 292 - DNA, 21 bp, Homo sapiens
aagtggttggtgtggtctctg

SEQ ID NO: 293 - RNA, 21 nt, RNAi-sense strand
gugguugguguggucucuguu

SEQ ID NO: 294 - RNA, 21 nt, RNAi-antisense strand
cagagaccacaccaaccacuu

SEQ ID NO: 295 - DNA, 21 bp, Homo sapiens
aaacgtcaagagatgtgaagc

SEQ ID NO: 296 - RNA, 21 nt, RNAi-sense strand
acgucaagagaugugaagcuu

SEQ ID NO: 297 - RNA, 21 nt, RNAi-antisense strand
gcuucacaucucuugacguuu

SEQ ID NO: 298 - DNA, 21 bp, Homo sapiens
aacgtcaagagatgtgaagcg

SEQ ID NO: 299 - RNA, 21 nt, RNAi-sense strand
cgucaagagaugugaagcguu

SEQ ID NO: 300 - RNA, 21 nt, RNAi-antisense strand
cgcuucacaucucuugacguu

SEQ ID NO: 301 - DNA, 21 bp, Homo sapiens
aagagatgtgaagcgcctgga

SEQ ID NO: 302 - RNA, 21 nt, RNAi-sense strand
gagaugugaagcgccuggauu

SEQ ID NO: 303 - RNA, 21 nt, RNAi-antisense strand
uccaggcgcuucacaucucuu

SEQ ID NO: 304 - DNA, 21 bp, Homo sapiens
aagcgcctggaatctacaact

SEQ ID NO: 305 - RNA, 21 nt, RNAi-sense strand
gcgccuggaaucuacaacuuu

SEQ ID NO: 306 - RNA, 21 nt, RNAi-antisense strand
aguuguagauuccaggcgcuu

SEQ ID NO: 307 - DNA, 21 bp, Homo sapiens
aatctacaactcggagtccag

SEQ ID NO: 308 - RNA, 21 nt, RNAi-sense strand
ucuacaacucggaguccaguu

SEQ ID NO: 309 - RNA, 21 nt, RNAi-antisense strand
cuggacuccgaguuguagauu

SEQ ID NO: 310 - DNA, 21 bp, Homo sapiens
aaagcagaagagaggtgtcag

SEQ ID NO: 311 - RNA, 21 nt, RNAi-sense strand
agcagaagagaggugucaguu

SEQ ID NO: 312 - RNA, 21 nt, RNAi-antisense strand
cugacaccucucuucugcuuu

SEQ ID NO: 313 - DNA, 21 bp, Homo sapiens
aagcagaagagaggtgtcagg

SEQ ID NO: 314 - RNA, 21 nt, RNAi-sense strand
gcagaagagaggugucagguu

SEQ ID NO: 315 - RNA, 21 nt, RNAi-antisense strand
ccugacaccucucuucugcuu

SEQ ID NO: 316 - DNA, 21 bp, Homo sapiens
aagagaggtgtcaggaactgt

SEQ ID NO: 317 - RNA, 21 nt, RNAi-sense strand
gagaggugucaggaacuguuu

SEQ ID NO: 318 - RNA, 21 nt, RNAi-antisense strand
acaguuccugacaccucucuu

SEQ ID NO: 319 - DNA, 21 bp, Homo sapiens
aactgtttgatgcacaccagg

SEQ ID NO: 320 - RNA, 21 nt, RNAi-sense strand
cuguuugaugcacaccagguu

SEQ ID NO: 321 - RNA, 21 nt, RNAi-antisense strand
ccuggugugcaucaaacaguu

SEQ ID NO: 322 - DNA, 21 bp, Homo sapiens
aaagtgctgaagttgagaata

SEQ ID NO: 323 - RNA, 21 nt, RNAi-sense strand
agugcugaaguugagaauauu

SEQ ID NO: 324 - RNA, 21 nt, RNAi-antisense strand
uauucucaacuucagcacuuu

SEQ ID NO: 325 - DNA, 21 bp, Homo sapiens
aagtgctgaagttgagaatat

SEQ ID NO: 326 - RNA, 21 nt, RNAi-sense strand
gugcugaaguugagaauauuu

SEQ ID NO: 327 - RNA, 21 nt, RNAi-antisense strand
auauucucaacuucagcacuu

SEQ ID NO: 328 - DNA, 21 bp, Homo sapiens
aaggagtgataatctttgaca

SEQ ID NO: 329 - RNA, 21 nt, RNAi-sense strand
ggagugauaaucuuugacauu

SEQ ID NO: 330 - RNA, 21 nt, RNAi-antisense strand
ugucaaagauuaucacuccuu

SEQ ID NO: 331 - DNA, 21 bp, Homo sapiens
aatgtgaacttcatgtacagt

SEQ ID NO: 332 - RNA, 21 nt, RNAi-sense strand
ugugaacuucauguacaguuu

SEQ ID NO: 333 - RNA, 21 nt, RNAi-antisense strand
acuguacaugaaguucacauu

SEQ ID NO: 334 - DNA, 21 bp, Homo sapiens
aacttcatgtacagtccaggt

SEQ ID NO: 335 - RNA, 21 nt, RNAi-sense strand
cuucauguacaguccagguuu

SEQ ID NO: 336 - RNA, 21 nt, RNAi-antisense strand
accuggacuguacaugaaguu

SEQ ID NO: 337 - DNA, 21 bp, Homo sapiens
aagcatctgacagcactcatt

SEQ ID NO: 338 - RNA, 21 nt, RNAi-sense strand
gcaucugacagcacucauuuu

SEQ ID NO: 339 - RNA, 21 nt, RNAi-antisense strand
aaugagugcugucagaugcuu

SEQ ID NO: 340 - DNA, 21 bp, Homo sapiens
aactgaaattggacttcacga

SEQ ID NO: 341 - RNA, 21 nt, RNAi-sense strand
cugaaauuggacuucacgauu

SEQ ID NO: 342 - RNA, 21 nt, RNAi-antisense strand
ucgugaaguccaauuucaguu

SEQ ID NO: 343 - DNA, 21 bp, Homo sapiens
aattggacttcacgatttaag

SEQ ID NO: 344 - RNA, 21 nt, RNAi-sense strand
uuggacuucacgauuuaaguu

SEQ ID NO: 345 - RNA, 21 nt, RNAi-antisense strand
cuuaaaucgugaaguccaauu

SEQ ID NO: 346 - DNA, 21 bp, Homo sapiens
aaatgtcaatcatacctcagg

SEQ ID NO: 347 - RNA, 21 nt, RNAi-sense strand
augucaaucauaccucagguu

SEQ ID NO: 348 - RNA, 21 nt, RNAi-antisense strand
ccugagguaugauugacauuu

SEQ ID NO: 349 - DNA, 21 bp, Homo sapiens
aatgtcaatcatacctcagga

SEQ ID NO: 350 - RNA, 21 nt, RNAi-sense strand
ugucaaucauaccucaggauu

SEQ ID NO: 351 - RNA, 21 nt, RNAi-antisense strand
uccugagguaugauugacauu

SEQ ID NO: 352 - DNA, 21 bp, Homo sapiens
aatcatacctcaggaacctgt

SEQ ID NO: 353 - RNA, 21 nt, RNAi-sense strand
ucauaccucaggaaccuguuu

SEQ ID NO: 354 - RNA, 21 nt, RNAi-antisense strand
acagguuccugagguaugauu

SEQ ID NO: 355 - DNA, 21 bp, Homo sapiens
aaggagcacacggatgaggaa

SEQ ID NO: 356 - RNA, 21 nt, RNAi-sense strand
ggagcacacggaugaggaauu

SEQ ID NO: 357 - RNA, 21 nt, RNAi-antisense strand
uuccucauccgugugcuccuu

SEQ ID NO: 358 - DNA, 21 bp, Homo sapiens
aactgtggaatgccttacaag

SEQ ID NO: 359 - RNA, 21 nt, RNAi-sense strand
cuguggaaugccuuacaaguu

SEQ ID NO: 360 - RNA, 21 nt, RNAi-antisense strand
cuuguaaggcauuccacaguu

SEQ ID NO: 361 - DNA, 21 bp, Homo sapiens
aatgccttacaagaggtacaa

SEQ ID NO: 362 - RNA, 21 nt, RNAi-sense strand
ugccuuacaagagguacaauu

SEQ ID NO: 363 - RNA, 21 nt, RNAi-antisense strand
uuguaccucuuguaaggcauu

SEQ ID NO: 364 - DNA, 21 bp, Homo sapiens
aagaaaccattgaagatcttc

SEQ ID NO: 365 - RNA, 21 nt, RNAi-sense strand
gaaaccauugaagaucuucuu

SEQ ID NO: 366 - RNA, 21 nt, RNAi-antisense strand
gaagaucuucaaugguuucuu

SEQ ID NO: 367 - DNA, 21 bp, Homo sapiens
aaaccattgaagatcttcctg

SEQ ID NO: 368 - RNA, 21 nt, RNAi-sense strand
accauugaagaucuuccuguu

SEQ ID NO: 369 - RNA, 21 nt, RNAi-antisense strand
caggaagaucuucaaugguuu

SEQ ID NO: 370 - DNA, 21 bp, Homo sapiens
aaccattgaagatcttcctgg

SEQ ID NO: 371 - RNA, 21 nt, RNAi-sense strand
ccauugaagaucuuccugguu

SEQ ID NO: 372 - RNA, 21 nt, RNAi-antisense strand
ccaggaagaucuucaaugguu

SEQ ID NO: 373 - DNA, 21 bp, Homo sapiens
aaatggatactgaattagcag

SEQ ID NO: 374 - RNA, 21 nt, RNAi-sense strand
auggauacugaauuagcaguu

SEQ ID NO: 375 - RNA, 21 nt, RNAi-antisense strand
cugcuaauucaguauccauuu

SEQ ID NO: 376 - DNA, 21 bp, Homo sapiens
aatggatactgaattagcaga

SEQ ID NO: 377 - RNA, 21 nt, RNAi-sense strand
uggauacugaauuagcagauu

SEQ ID NO: 378 - RNA, 21 nt, RNAi-antisense strand
ucugcuaauucaguauccauu

SEQ ID NO: 379 - DNA, 21 bp, Homo sapiens
aattagcagaatcaggatcca

SEQ ID NO: 380 - RNA, 21 nt, RNAi-sense strand
uuagcagaaucaggauccauu

SEQ ID NO: 381 - RNA, 21 nt, RNAi-antisense strand
uggauccugauucugcuaauu

SEQ ID NO: 382 - DNA, 21 bp, Homo sapiens
aaagacaactggtgtgccttg

SEQ ID NO: 383 - RNA, 21 nt, RNAi-sense strand
agacaacuggugugccuuguu

SEQ ID NO: 384 - RNA, 21 nt, RNAi-antisense strand
caaggcacaccaguugucuuu

SEQ ID NO: 385 - DNA, 21 bp, Homo sapiens
aagacaactggtgtgccttgc

SEQ ID NO: 386 - RNA, 21 nt, RNAi-sense strand
gacaacuggugugccuugcuu

SEQ ID NO: 387 - RNA, 21 nt, RNAi-antisense strand
gcaaggcacaccaguugucuu

SEQ ID NO: 388 - DNA, 21 bp, Homo sapiens
aagcgacggcaaatgtggatc

SEQ ID NO: 389 - RNA, 21 nt, RNAi-sense strand
gcgacggcaaauguggaucuu

SEQ ID NO: 390 - RNA, 21 nt, RNAi-antisense strand
gauccacauuugccgucgcuu

SEQ ID NO: 391 - DNA, 21 bp, Homo sapiens
aaatgtggatccaagaactga

SEQ ID NO: 392 - RNA, 21 nt, RNAi-sense strand
auguggauccaagaacugauu

SEQ ID NO: 393 - RNA, 21 nt, RNAi-antisense strand
ucaguucuuggauccacauuu

SEQ ID NO: 394 - DNA, 21 bp, Homo sapiens
aatgtggatccaagaactgat

SEQ ID NO: 395 - RNA, 21 nt, RNAi-sense strand
uguggauccaagaacugauuu

SEQ ID NO: 396 - RNA, 21 nt, RNAi-antisense strand
aucaguucuuggauccacauu

SEQ ID NO: 397 - DNA, 21 bp, Homo sapiens
aaccattgcacacagattgaa

SEQ ID NO: 398 - RNA, 21 nt, RNAi-sense strand
ccauugcacacagauugaauu

SEQ ID NO: 399 - RNA, 21 nt, RNAi-antisense strand
uucaaucugugugcaaugguu

SEQ ID NO: 400 - DNA, 21 bp, Homo sapiens
aacaccattattgacagcgac

SEQ ID NO: 401 - RNA, 21 nt, RNAi-sense strand
caccauuauugacagcgacuu

SEQ ID NO: 402 - RNA, 21 nt, RNAi-antisense strand
gucgcugucaauaaugguguu

SEQ ID NO: 403 - DNA, 21 bp, Homo sapiens
aaagaatatgatgagccgtat

SEQ ID NO: 404 - RNA, 21 nt, RNAi-sense strand
agaauaugaugagccguauuu

SEQ ID NO: 405 - RNA, 21 nt, RNAi-antisense strand
auacggcucaucauauucuuu

SEQ ID NO: 406 - DNA, 21 bp, Homo sapiens
aagaatatgatgagccgtatg

SEQ ID NO: 407 - RNA, 21 nt, RNAi-sense strand
gaauaugaugagccguauguu

SEQ ID NO: 408 - RNA, 21 nt, RNAi-antisense strand
cauacggcucaucauauucuu

SEQ ID NO: 409 - DNA, 21 bp, Homo sapiens
aatatgatgagccgtatgttt

SEQ ID NO: 410 - RNA, 21 nt, RNAi-sense strand
uaugaugagccguauguuuuu

SEQ ID NO: 411 - RNA, 21 nt, RNAi-antisense strand
aaacauacggcucaucauauu

SEQ ID NO: 412 - DNA, 21 bp, Homo sapiens
aattatccacatattggtcac

SEQ ID NO: 413 - RNA, 21 nt, RNAi-sense strand
uuauccacauauuggucacuu

SEQ ID NO: 414 - RNA, 21 nt, RNAi-antisense strand
gugaccaauauguggauaauu

SEQ ID NO: 415 - DNA, 21 bp, Homo sapiens
aaacacttccaatggacagcc

SEQ ID NO: 416 - RNA, 21 nt, RNAi-sense strand
acacuuccaauggacagccuu

SEQ ID NO: 417 - RNA, 21 nt, RNAi-antisense strand
ggcuguccauuggaaguguuu

SEQ ID NO: 418 - DNA, 21 bp, Homo sapiens
aaatgtcaagtccgttccgaa

SEQ ID NO: 419 - RNA, 21 nt, RNAi-sense strand
augucaaguccguuccgaauu

SEQ ID NO: 420 - RNA, 21 nt, RNAi-antisense strand
uucggaacggacuugacauuu

SEQ ID NO: 421 - DNA, 21 bp, Homo sapiens
aatgtcaagtccgttccgaag

SEQ ID NO: 422 - RNA, 21 nt, RNAi-sense strand
ugucaaguccguuccgaaguu

SEQ ID NO: 423 - RNA, 21 nt, RNAi-antisense strand
cuucggaacggacuugacauu

SEQ ID NO: 424 - DNA, 21 bp, Homo sapiens
aagtccgttccgaaggcattt

SEQ ID NO: 425 - RNA, 21 nt, RNAi-sense strand
guccguuccgaaggcauuuuu

SEQ ID NO: 426 - RNA, 21 nt, RNAi-antisense strand
aaaugccuucggaacggacuu

SEQ ID NO: 427 - DNA, 21 bp, Homo sapiens
caggacgcgaacatctgctca

SEQ ID NO: 428 - RNA, 21 nt, RNAi-sense strand
ggacgcgaacaucugcucauu

SEQ ID NO: 429 - RNA, 21 nt, RNAi-antisense strand
ugagcagauguucgcguccuu

SEQ ID NO: 430 - DNA, 21 bp, Homo sapiens
catctgctcacgcgtgttctt

SEQ ID NO: 431 - RNA, 21 nt, RNAi-sense strand
ucugcucacgcguguucuuuu

SEQ ID NO: 432 - RNA, 21 nt, RNAi-antisense strand
aagaacacgcgugagcagauu

SEQ ID NO: 433 - DNA, 21 bp, Homo sapiens
cacgcgtgttcttctggtggc

SEQ ID NO: 434 - RNA, 21 nt, RNAi-sense strand
cgcguguucuucugguggcuu

SEQ ID NO: 435 - RNA, 21 nt, RNAi-antisense strand
gccaccagaagaacacgcguu

SEQ ID NO: 436 - DNA, 21 bp, Homo sapiens
cataaacggagattagaggaa

SEQ ID NO: 437 - RNA, 21 nt, RNAi-sense strand
uaaacggagauuagaggaauu

SEQ ID NO: 438 - RNA, 21 nt, RNAi-antisense strand
uuccucuaaucuccguuuauu

SEQ ID NO: 439 - DNA, 21 bp, Homo sapiens
cagtgctgccagaagaccgct

SEQ ID NO: 440 - RNA, 21 nt, RNAi-sense strand
gugcugccagaagaccgcuuu

SEQ ID NO: 441 - RNA, 21 nt, RNAi-antisense strand
agcggucuucuggcagcacuu

SEQ ID NO: 442 - DNA, 21 bp, Homo sapiens
cagaagaccgctcacagcacc

SEQ ID NO: 443 - RNA, 21 nt, RNAi-sense strand
gaagaccgcucacagcaccuu

SEQ ID NO: 444 - RNA, 21 nt, RNAi-antisense strand
ggugcugugagcggucuucuu

SEQ ID NO: 445 - DNA, 21 bp, Homo sapiens
cacagcaccttggagaggagt

SEQ ID NO: 446 - RNA, 21 nt, RNAi-sense strand
cagcaccuuggagaggaguuu

SEQ ID NO: 447 - RNA, 21 nt, RNAi-antisense strand
acuccucuccaaggugcuguu

SEQ ID NO: 448 - DNA, 21 bp, Homo sapiens
cagcaccttggagaggagttg

SEQ ID NO: 449 - RNA, 21 nt, RNAi-sense strand
gcaccuuggagaggaguuguu

SEQ ID NO: 450 - RNA, 21 nt, RNAi-antisense strand
caacuccucuccaaggugcuu

SEQ ID NO: 451 - DNA, 21 bp, Homo sapiens
caccttggagaggagttgcaa

SEQ ID NO: 452 - RNA, 21 nt, RNAi-sense strand
ccuuggagaggaguugcaauu

SEQ ID NO: 453 - RNA, 21 nt, RNAi-antisense strand
uugcaacuccucuccaagguu

SEQ ID NO: 454 - DNA, 21 bp, Homo sapiens
cacagaagccttctttaacaa

SEQ ID NO: 455 - RNA, 21 nt, RNAi-sense strand
cagaagccuucuuuaacaauu

SEQ ID NO: 456 - RNA, 21 nt, RNAi-antisense strand
uuguuaaagaaggcuucuguu

SEQ ID NO: 457 - DNA, 21 bp, Homo sapiens
cagaagccttctttaacaaga

SEQ ID NO: 458 - RNA, 21 nt, RNAi-sense strand
gaagccuucuuuaacaagauu

SEQ ID NO: 459 - RNA, 21 nt, RNAi-antisense strand
ucuuguuaaagaaggcuucuu

SEQ ID NO: 460 - DNA, 21 bp, Homo sapiens
caagagcaatcataaagtgtt

SEQ ID NO: 461 - RNA, 21 nt, RNAi-sense strand
agagcaaucauaaaguguuuu

SEQ ID NO: 462 - RNA, 21 nt, RNAi-antisense strand
aacacuuuaugauugcucuuu

SEQ ID NO: 463 - DNA, 21 bp, Homo sapiens
caatcataaagtgttactgga

SEQ ID NO: 464 - RNA, 21 nt, RNAi-sense strand
aucauaaaguguuacuggauu

SEQ ID NO: 465 - RNA, 21 nt, RNAi-antisense strand
uccaguaacacuuuaugauuu

SEQ ID NO: 466 - DNA, 21 bp, Homo sapiens
cataaagtgttactggaaatc

SEQ ID NO: 467 - RNA, 21 nt, RNAi-sense strand
uaaaguguuacuggaaaucuu

SEQ ID NO: 468 - RNA, 21 nt, RNAi-antisense strand
gauuuccaguaacacuuuauu

SEQ ID NO: 469 - DNA, 21 bp, Homo sapiens
catggattctgtggctttgaa

SEQ ID NO: 470 - RNA, 21 nt, RNAi-sense strand
uggauucuguggcuuugaauu

SEQ ID NO: 471 - RNA, 21 nt, RNAi-antisense strand
uucaaagccacagaauccauu

SEQ ID NO: 472 - DNA, 21 bp, Homo sapiens
cacagcgtacgcctatgccac

SEQ ID NO: 473 - RNA, 21 nt, RNAi-sense strand
cagcguacgccuaugccacuu

SEQ ID NO: 474 - RNA, 21 nt, RNAi-antisense strand
guggcauaggcguacgcuguu

SEQ ID NO: 475 - DNA, 21 bp, Homo sapiens
catgtgccatatgatttatcg

SEQ ID NO: 476 - RNA, 21 nt, RNAi-sense strand
ugugccauaugauuuaucguu

SEQ ID NO: 477 - RNA, 21 nt, RNAi-antisense strand
cgauaaaucauauggcacauu

SEQ ID NO: 478 - DNA, 21 bp, Homo sapiens
catatgatttatcggaaggca

SEQ ID NO: 479 - RNA, 21 nt, RNAi-sense strand
uaugauuuaucggaaggcauu

SEQ ID NO: 480 - RNA, 21 nt, RNAi-antisense strand
ugccuuccgauaaaucauauu

SEQ ID NO: 481 - DNA, 21 bp, Homo sapiens
cacttcgtcttagtaacatgg

SEQ ID NO: 482 - RNA, 21 nt, RNAi-sense strand
cuucgucuuaguaacaugguu

SEQ ID NO: 483 - RNA, 21 nt, RNAi-antisense strand
ccauguuacuaagacgaaguu

SEQ ID NO: 484 - DNA, 21 bp, Homo sapiens
caaccacaggccagatagtca

SEQ ID NO: 485 - RNA, 21 nt, RNAi-sense strand
accacaggccagauagucauu

SEQ ID NO: 486 - RNA, 21 nt, RNAi-antisense strand
ugacuaucuggccugugguuu

SEQ ID NO: 487 - DNA, 21 bp, Homo sapiens
cacaggccagatagtcaatct

SEQ ID NO: 488 - RNA, 21 nt, RNAi-sense strand
caggccagauagucaaucuuu

SEQ ID NO: 489 - RNA, 21 nt, RNAi-antisense strand
agauugacuaucuggccuguu

SEQ ID NO: 490 - DNA, 21 bp, Homo sapiens
caggccagatagtcaatctgc

SEQ ID NO: 491 - RNA, 21 nt, RNAi-sense strand
ggccagauagucaaucugcuu

SEQ ID NO: 492 - RNA, 21 nt, RNAi-antisense strand
gcagauugacuaucuggccuu

SEQ ID NO: 493 - DNA, 21 bp, Homo sapiens
cagatagtcaatctgctgtcc

SEQ ID NO: 494 - RNA, 21 nt, RNAi-sense strand
gauagucaaucugcuguccuu

SEQ ID NO: 495 - RNA, 21 nt, RNAi-antisense strand
ggacagcagauugacuaucuu

SEQ ID NO: 496 - DNA, 21 bp, Homo sapiens
caatctgctgtccaatgatgt

SEQ ID NO: 497 - RNA, 21 nt, RNAi-sense strand
aucugcuguccaaugauguuu

SEQ ID NO: 498 - RNA, 21 nt, RNAi-antisense strand
acaucauuggacagcagauuu

SEQ ID NO: 499 - DNA, 21 bp, Homo sapiens
caatgatgtgaacaagtttga

SEQ ID NO: 500 - RNA, 21 nt, RNAi-sense strand
augaugugaacaaguuugauu

SEQ ID NO: 501 - RNA, 21 nt, RNAi-antisense strand
ucaaacuuguucacaucauuu

SEQ ID NO: 502 - DNA, 21 bp, Homo sapiens
caagtttgatcaggtgacagt

SEQ ID NO: 503 - RNA, 21 nt, RNAi-sense strand
aguuugaucaggugacaguuu

SEQ ID NO: 504 - RNA, 21 nt, RNAi-antisense strand
acugucaccugaucaaacuuu

SEQ ID NO: 505 - DNA, 21 bp, Homo sapiens
caggtgacagtgttcttacac

SEQ ID NO: 506 - RNA, 21 nt, RNAi-sense strand
ggugacaguguucuuacacuu

SEQ ID NO: 507 - RNA, 21 nt, RNAi-antisense strand
guguaagaacacugucaccuu

SEQ ID NO: 508 - DNA, 21 bp, Homo sapiens
cagtgttcttacacttcctgt

SEQ ID NO: 509 - RNA, 21 nt, RNAi-sense strand
guguucuuacacuuccuguuu

SEQ ID NO: 510 - RNA, 21 nt, RNAi-antisense strand
acaggaaguguaagaacacuu

SEQ ID NO: 511 - DNA, 21 bp, Homo sapiens
cactgcaggcgatcgcagtga

SEQ ID NO: 512 - RNA, 21 nt, RNAi-sense strand
cugcaggcgaucgcagugauu

SEQ ID NO: 513 - RNA, 21 nt, RNAi-antisense strand
ucacugcgaucgccugcaguu

SEQ ID NO: 514 - DNA, 21 bp, Homo sapiens
cagttctaatcattctcctgc

SEQ ID NO: 515 - RNA, 21 nt, RNAi-sense strand
guucuaaucauucuccugcuu

SEQ ID NO: 516 - RNA, 21 nt, RNAi-antisense strand
gcaggagaaugauuagaacuu

SEQ ID NO: 517 - DNA, 21 bp, Homo sapiens
caactttcacggatgccagga

SEQ ID NO: 518 - RNA, 21 nt, RNAi-sense strand
acuuucacggaugccaggauu

SEQ ID NO: 519 - RNA, 21 nt, RNAi-antisense strand
uccuggcauccgugaaaguuu

SEQ ID NO: 520 - DNA, 21 bp, Homo sapiens
cacggatgccaggatcaggac

SEQ ID NO: 521 - RNA, 21 nt, RNAi-sense strand
cggaugccaggaucaggacuu

SEQ ID NO: 522 - RNA, 21 nt, RNAi-antisense strand
guccugauccuggcauccguu

SEQ ID NO: 523 - DNA, 21 bp, Homo sapiens
caggatcaggaccatgaatga

SEQ ID NO: 524 - RNA, 21 nt, RNAi-sense strand
ggaucaggaccaugaaugauu

SEQ ID NO: 525 - RNA, 21 nt, RNAi-antisense strand
ucauucaugguccugauccuu

SEQ ID NO: 526 - DNA, 21 bp, Homo sapiens
caggaccatgaatgaagttat

SEQ ID NO: 527 - RNA, 21 nt, RNAi-sense strand
ggaccaugaaugaaguuauuu

SEQ ID NO: 528 - RNA, 21 nt, RNAi-antisense strand
auaacuucauucaugguccuu

SEQ ID NO: 529 - DNA, 21 bp, Homo sapiens
catgaatgaagttataactgg

SEQ ID NO: 530 - RNA, 21 nt, RNAi-sense strand
ugaaugaaguuauaacugguu

SEQ ID NO: 531 - RNA, 21 nt, RNAi-antisense strand
ccaguuauaacuucauucauu

SEQ ID NO: 532 - DNA, 21 bp, Homo sapiens
caatttgagaaagaaggagat

SEQ ID NO: 533 - RNA, 21 nt, RNAi-sense strand
auuugagaaagaaggagauuu

SEQ ID NO: 534 - RNA, 21 nt, RNAi-antisense strand
aucuccuucuuucucaaauuu

SEQ ID NO: 535 - DNA, 21 bp, Homo sapiens
caagattctgagaagttcctg

SEQ ID NO: 536 - RNA, 21 nt, RNAi-sense strand
agauucugagaaguuccuguu

SEQ ID NO: 537 - RNA, 21 nt, RNAi-antisense strand
caggaacuucucagaaucuuu

SEQ ID NO: 538 - DNA, 21 bp, Homo sapiens
catcgtgtttgtgaccttcac

SEQ ID NO: 539 - RNA, 21 nt, RNAi-sense strand
ucguguuugugaccuucacuu

SEQ ID NO: 540 - RNA, 21 nt, RNAi-antisense strand
gugaaggucacaaacacgauu

SEQ ID NO: 541 - DNA, 21 bp, Homo sapiens
cagtgtgatcacagccagccg

SEQ ID NO: 542 - RNA, 21 nt, RNAi-sense strand
gugugaucacagccagccguu

SEQ ID NO: 543 - RNA, 21 nt, RNAi-antisense strand
cggcuggcugugaucacacuu

SEQ ID NO: 544 - DNA, 21 bp, Homo sapiens
cagaggcaatcgtcagcatcc

SEQ ID NO: 545 - RNA, 21 nt, RNAi-sense strand
gaggcaaucgucagcauccuu

SEQ ID NO: 546 - RNA, 21 nt, RNAi-antisense strand
ggaugcugacgauugccucuu

SEQ ID NO: 547 - DNA, 21 bp, Homo sapiens
caatcgtcagcatccgaagaa

SEQ ID NO: 548 - RNA, 21 nt, RNAi-sense strand
aucgucagcauccgaagaauu

SEQ ID NO: 549 - RNA, 21 nt, RNAi-antisense strand
uucuucggaugcugacgauuu

SEQ ID NO: 550 - DNA, 21 bp, Homo sapiens
cagcatccgaagaatccagac

SEQ ID NO: 551 - RNA, 21 nt, RNAi-sense strand
gcauccgaagaauccagacuu

SEQ ID NO: 552 - RNA, 21 nt, RNAi-antisense strand
gucuggauucuucggaugcuu

SEQ ID NO: 553 - DNA, 21 bp, Homo sapiens
catccgaagaatccagacctt

SEQ ID NO: 554 - RNA, 21 nt, RNAi-sense strand
uccgaagaauccagaccuuuu

SEQ ID NO: 555 - RNA, 21 nt, RNAi-antisense strand
aaggucuggauucuucggauu

SEQ ID NO: 556 - DNA, 21 bp, Homo sapiens
caaccgtcagctgccgtcaga

SEQ ID NO: 557 - RNA, 21 nt, RNAi-sense strand
accgucagcugccgucagauu

SEQ ID NO: 558 - RNA, 21 nt, RNAi-antisense strand
ucugacggcagcugacgguuu

SEQ ID NO: 559 - DNA, 21 bp, Homo sapiens
cagctgccgtcagatggtaaa

SEQ ID NO: 560 - RNA, 21 nt, RNAi-sense strand
gcugccgucagaugguaaauu

SEQ ID NO: 561 - RNA, 21 nt, RNAi-antisense strand
uuuaccaucugacggcagcuu

SEQ ID NO: 562 - DNA, 21 bp, Homo sapiens
caactctacaaggcctttcct

SEQ ID NO: 563 - RNA, 21 nt, RNAi-sense strand
acucuacaaggccuuuccuuu

SEQ ID NO: 564 - RNA, 21 nt, RNAi-antisense strand
aggaaaggccuuguagaguuu

SEQ ID NO: 565 - DNA, 21 bp, Homo sapiens
caaggcctttcctttactgtc

SEQ ID NO: 566 - RNA, 21 nt, RNAi-sense strand
aggccuuuccuuuacugucuu

SEQ ID NO: 567 - RNA, 21 nt, RNAi-antisense strand
gacaguaaaggaaaggccuuu

SEQ ID NO: 568 - DNA, 21 bp, Homo sapiens
cagacctggcgaattgttagc

SEQ ID NO: 569 - RNA, 21 nt, RNAi-sense strand
gaccuggcgaauuguuagcuu

SEQ ID NO: 570 - RNA, 21 nt, RNAi-antisense strand
gcuaacaauucgccaggucuu

SEQ ID NO: 571 - DNA, 21 bp, Homo sapiens
catcactgttaagtgccgtgc

SEQ ID NO: 572 - RNA, 21 nt, RNAi-sense strand
ucacuguuaagugccgugcuu

SEQ ID NO: 573 - RNA, 21 nt, RNAi-antisense strand
gcacggcacuuaacagugauu

SEQ ID NO: 574 - DNA, 21 bp, Homo sapiens
cactgttaagtgccgtgctcg

SEQ ID NO: 575 - RNA, 21 nt, RNAi-sense strand
cuguuaagugccgugcucguu

SEQ ID NO: 576 - RNA, 21 nt, RNAi-antisense strand
cgagcacggcacuuaacaguu

SEQ ID NO: 577 - DNA, 21 bp, Homo sapiens
cagcgtgcatggaagaattgc

SEQ ID NO: 578 - RNA, 21 nt, RNAi-sense strand
gcgugcauggaagaauugcuu

SEQ ID NO: 579 - RNA, 21 nt, RNAi-antisense strand
gcaauucuuccaugcacgcuu

SEQ ID NO: 580 - DNA, 21 bp, Homo sapiens
catggaagaattgcctatgtg

SEQ ID NO: 581 - RNA, 21 nt, RNAi-sense strand
uggaagaauugccuauguguu

SEQ ID NO: 582 - RNA, 21 nt, RNAi-antisense strand
cacauaggcaauucuuccauu

SEQ ID NO: 583 - DNA, 21 bp, Homo sapiens
cataaaggcttgtgctctgaa

SEQ ID NO: 584 - RNA, 21 nt, RNAi-sense strand
uaaaggcuugugcucugaauu

SEQ ID NO: 585 - RNA, 21 nt, RNAi-antisense strand
uucagagcacaagccuuuauu

SEQ ID NO: 586 - DNA, 21 bp, Homo sapiens
cagctgttggaggatggtgat

SEQ ID NO: 587 - RNA, 21 nt, RNAi-sense strand
gcuguuggaggauggugauuu

SEQ ID NO: 588 - RNA, 21 nt, RNAi-antisense strand
aucaccauccuccaacagcuu

SEQ ID NO: 589 - DNA, 21 bp, Homo sapiens
caagagcagtgtatcaagatg

SEQ ID NO: 590 - RNA, 21 nt, RNAi-sense strand
agagcaguguaucaagauguu

SEQ ID NO: 591 - RNA, 21 nt, RNAi-antisense strand
caucuugauacacugcucuuu

SEQ ID NO: 592 - DNA, 21 bp, Homo sapiens
cagtgtatcaagatgctgaca

SEQ ID NO: 593 - RNA, 21 nt, RNAi-sense strand
guguaucaagaugcugacauu

SEQ ID NO: 594 - RNA, 21 nt, RNAi-antisense strand
ugucagcaucuugauacacuu

SEQ ID NO: 595 - DNA, 21 bp, Homo sapiens
caagatgctgacatctatctc

SEQ ID NO: 596 - RNA, 21 nt, RNAi-sense strand
agaugcugacaucuaucucuu

SEQ ID NO: 597 - RNA, 21 nt, RNAi-antisense strand
gagauagaugucagcaucuuu

SEQ ID NO: 598 - DNA, 21 bp, Homo sapiens
catctatctcctggacgatcc

SEQ ID NO: 599 - RNA, 21 nt, RNAi-sense strand
ucuaucuccuggacgauccuu

SEQ ID NO: 600 - RNA, 21 nt, RNAi-antisense strand
ggaucguccaggagauagauu

SEQ ID NO: 601 - DNA, 21 bp, Homo sapiens
cagtgcagtagatgcggaagt

SEQ ID NO: 602 - RNA, 21 nt, RNAi-sense strand
gugcaguagaugcggaaguuu

SEQ ID NO: 603 - RNA, 21 nt, RNAi-antisense strand
acuuccgcaucuacugcacuu

SEQ ID NO: 604 - DNA, 21 bp, Homo sapiens
cagtagatgcggaagttagca

SEQ ID NO: 605 - RNA, 21 nt, RNAi-sense strand
guagaugcggaaguuagcauu

SEQ ID NO: 606 - RNA, 21 nt, RNAi-antisense strand
ugcuaacuuccgcaucuacuu

SEQ ID NO: 607 - DNA, 21 bp, Homo sapiens
cagacacttgttcgaactgtg

SEQ ID NO: 608 - RNA, 21 nt, RNAi-sense strand
gacacuuguucgaacuguguu

SEQ ID NO: 609 - RNA, 21 nt, RNAi-antisense strand
cacaguucgaacaagugucuu

SEQ ID NO: 610 - DNA, 21 bp, Homo sapiens
cacttgttcgaactgtgtatt

SEQ ID NO: 611 - RNA, 21 nt, RNAi-sense strand
cuuguucgaacuguguauuuu

SEQ ID NO: 612 - RNA, 21 nt, RNAi-antisense strand
aauacacaguucgaacaaguu

SEQ ID NO: 613 - DNA, 21 bp, Homo sapiens
catcagttgcagtacctcaaa

SEQ ID NO: 614 - RNA, 21 nt, RNAi-sense strand
ucaguugcaguaccucaaauu

SEQ ID NO: 615 - RNA, 21 nt, RNAi-antisense strand
uuugagguacugcaacugauu

SEQ ID NO: 616 - DNA, 21 bp, Homo sapiens
cagttgcagtacctcaaagct

SEQ ID NO: 617 - RNA, 21 nt, RNAi-sense strand
guugcaguaccucaaagcuuu

SEQ ID NO: 618 - RNA, 21 nt, RNAi-antisense strand
agcuuugagguacugcaacuu

SEQ ID NO: 619 - DNA, 21 bp, Homo sapiens
cagtacctcaaagctgcaagt

SEQ ID NO: 620 - RNA, 21 nt, RNAi-sense strand
guaccucaaagcugcaaguuu

SEQ ID NO: 621 - RNA, 21 nt, RNAi-antisense strand
acuugcagcuuugagguacuu

SEQ ID NO: 622 - DNA, 21 bp, Homo sapiens
caaagctgcaagtcagattct

SEQ ID NO: 623 - RNA, 21 nt, RNAi-sense strand
aagcugcaagucagauucuuu

SEQ ID NO: 624 - RNA, 21 nt, RNAi-antisense strand
agaaucugacuugcagcuuuu

SEQ ID NO: 625 - DNA, 21 bp, Homo sapiens
caagtcagattctgatattga

SEQ ID NO: 626 - RNA, 21 nt, RNAi-sense strand
agucagauucugauauugauu

SEQ ID NO: 627 - RNA, 21 nt, RNAi-antisense strand
ucaauaucagaaucugacuuu

SEQ ID NO: 628 - DNA, 21 bp, Homo sapiens
caacctccagttccaggaact

SEQ ID NO: 629 - RNA, 21 nt, RNAi-sense strand
accuccaguuccaggaacuuu

SEQ ID NO: 630 - RNA, 21 nt, RNAi-antisense strand
aguuccuggaacuggagguuu

SEQ ID NO: 631 - DNA, 21 bp, Homo sapiens
cacactaaggaatcgtacctt

SEQ ID NO: 632 - RNA, 21 nt, RNAi-sense strand
cacuaaggaaucguaccuuuu

SEQ ID NO: 633 - RNA, 21 nt, RNAi-antisense strand
aagguacgauuccuuaguguu

SEQ ID NO: 634 - DNA, 21 bp, Homo sapiens
cactaaggaatcgtaccttct

SEQ ID NO: 635 - RNA, 21 nt, RNAi-sense strand
cuaaggaaucguaccuucuuu

SEQ ID NO: 636 - RNA, 21 nt, RNAi-antisense strand
agaagguacgauuccuuaguu

SEQ ID NO: 637 - DNA, 21 bp, Homo sapiens
cagagtcttcggtttggtctc

SEQ ID NO: 638 - RNA, 21 nt, RNAi-sense strand
gagucuucgguuuggucucuu

SEQ ID NO: 639 - RNA, 21 nt, RNAi-antisense strand
gagaccaaaccgaagacucuu

SEQ ID NO: 640 - DNA, 21 bp, Homo sapiens
cagttacactatcagaggaga

SEQ ID NO: 641 - RNA, 21 nt, RNAi-sense strand
guuacacuaucagaggagauu

SEQ ID NO: 642 - RNA, 21 nt, RNAi-antisense strand
ucuccucugauaguguaacuu

SEQ ID NO: 643 - DNA, 21 bp, Homo sapiens
cactatcagaggagaaccgtt

SEQ ID NO: 644 - RNA, 21 nt, RNAi-sense strand
cuaucagaggagaaccguuuu

SEQ ID NO: 645 - RNA, 21 nt, RNAi-antisense strand
aacgguucuccucugauaguu

SEQ ID NO: 646 - DNA, 21 bp, Homo sapiens
cagaggagaaccgttctgaag

SEQ ID NO: 647 - RNA, 21 nt, RNAi-sense strand
gaggagaaccguucugaaguu

SEQ ID NO: 648 - RNA, 21 nt, RNAi-antisense strand
cuucagaacgguucuccucuu

SEQ ID NO: 649 - DNA, 21 bp, Homo sapiens
caggcctataagaattacttc

SEQ ID NO: 650 - RNA, 21 nt, RNAi-sense strand
ggccuauaagaauuacuucuu

SEQ ID NO: 651 - RNA, 21 nt, RNAi-antisense strand
gaaguaauucuuauaggccuu

SEQ ID NO: 652 - DNA, 21 bp, Homo sapiens
cagagctggtgctcactggat

SEQ ID NO: 653 - RNA, 21 nt, RNAi-sense strand
gagcuggugcucacuggauuu

SEQ ID NO: 654 - RNA, 21 nt, RNAi-antisense strand
auccagugagcaccagcucuu

SEQ ID NO: 655 - DNA, 21 bp, Homo sapiens
cactgcagctcaggttgccta

SEQ ID NO: 656 - RNA, 21 nt, RNAi-sense strand
cugcagcucagguugccuauu

SEQ ID NO: 657 - RNA, 21 nt, RNAi-antisense strand
uaggcaaccugagcugcaguu

SEQ ID NO: 658 - DNA, 21 bp, Homo sapiens
cagctcaggttgcctatgtgc

SEQ ID NO: 659 - RNA, 21 nt, RNAi-sense strand
gcucagguugccuaugugcuu

SEQ ID NO: 660 - RNA, 21 nt, RNAi-antisense strand
gcacauaggcaaccugagcuu

SEQ ID NO: 661 - DNA, 21 bp, Homo sapiens
caggttgcctatgtgcttcaa

SEQ ID NO: 662 - RNA, 21 nt, RNAi-sense strand
gguugccuaugugcuucaauu

SEQ ID NO: 663 - RNA, 21 nt, RNAi-antisense strand
uugaagcacauaggcaaccuu

SEQ ID NO: 664 - DNA, 21 bp, Homo sapiens
caagattggtggctttcatac

SEQ ID NO: 665 - RNA, 21 nt, RNAi-sense strand
agauugguggcuuucauacuu

SEQ ID NO: 666 - RNA, 21 nt, RNAi-antisense strand
guaugaaagccaccaaucuuu

SEQ ID NO: 667 - DNA, 21 bp, Homo sapiens
caaagtatgctaaatgtcact

SEQ ID NO: 668 - RNA, 21 nt, RNAi-sense strand
aaguaugcuaaaugucacuuu

SEQ ID NO: 669 - RNA, 21 nt, RNAi-antisense strand
agugacauuuagcauacuuuu

SEQ ID NO: 670 - DNA, 21 bp, Homo sapiens
cactgtaaatggaggaggaaa

SEQ ID NO: 671 - RNA, 21 nt, RNAi-sense strand
cuguaaauggaggaggaaauu

SEQ ID NO: 672 - RNA, 21 nt, RNAi-antisense strand
uuuccuccuccauuuacaguu

SEQ ID NO: 673 - DNA, 21 bp, Homo sapiens
caggtttaactgtagctaccg

SEQ ID NO: 674 - RNA, 21 nt, RNAi-sense strand
gguuuaacuguagcuaccguu

SEQ ID NO: 675 - RNA, 21 nt, RNAi-antisense strand
cgguagcuacaguuaaaccuu

SEQ ID NO: 676 - DNA, 21 bp, Homo sapiens
catagcaagatctctattggt

SEQ ID NO: 677 - RNA, 21 nt, RNAi-sense strand
uagcaagaucucuauugguuu

SEQ ID NO: 678 - RNA, 21 nt, RNAi-antisense strand
accaauagagaucuugcuauu

SEQ ID NO: 679 - DNA, 21 bp, Homo sapiens
caagatctctattggtattct

SEQ ID NO: 680 - RNA, 21 nt, RNAi-sense strand
agaucucuauugguauucuuu

SEQ ID NO: 681 - RNA, 21 nt, RNAi-antisense strand
agaauaccaauagagaucuuu

SEQ ID NO: 682 - DNA, 21 bp, Homo sapiens
caattctgaaagctccggtat

SEQ ID NO: 683 - RNA, 21 nt, RNAi-sense strand
auucugaaagcuccgguauuu

SEQ ID NO: 684 - RNA, 21 nt, RNAi-antisense strand
auaccggagcuuucagaauuu

SEQ ID NO: 685 - DNA, 21 bp, Homo sapiens
caaagacattggacacttgga

SEQ ID NO: 686 - RNA, 21 nt, RNAi-sense strand
aagacauuggacacuuggauu

SEQ ID NO: 687 - RNA, 21 nt, RNAi-antisense strand
uccaaguguccaaugucuuuu

SEQ ID NO: 688 - DNA, 21 bp, Homo sapiens
cattggacacttggatgattt

SEQ ID NO: 689 - RNA, 21 nt, RNAi-sense strand
uuggacacuuggaugauuuuu

SEQ ID NO: 690 - RNA, 21 nt, RNAi-antisense strand
aaaucauccaaguguccaauu

SEQ ID NO: 691 - DNA, 21 bp, Homo sapiens
cacttggatgatttgctgccg

SEQ ID NO: 692 - RNA, 21 nt, RNAi-sense strand
cuuggaugauuugcugccguu

SEQ ID NO: 693 - RNA, 21 nt, RNAi-antisense strand
cggcagcaaaucauccaaguu

SEQ ID NO: 694 - DNA, 21 bp, Homo sapiens
catccagacattgctacaagt

SEQ ID NO: 695 - RNA, 21 nt, RNAi-sense strand
uccagacauugcuacaaguuu

SEQ ID NO: 696 - RNA, 21 nt, RNAi-antisense strand
acuuguagcaaugucuggauu

SEQ ID NO: 697 - DNA, 21 bp, Homo sapiens
cagacattgctacaagtggtt

SEQ ID NO: 698 - RNA, 21 nt, RNAi-sense strand
gacauugcuacaagugguuuu

SEQ ID NO: 699 - RNA, 21 nt, RNAi-antisense strand
aaccacuuguagcaaugucuu

SEQ ID NO: 700 - DNA, 21 bp, Homo sapiens
cattgctacaagtggttggtg

SEQ ID NO: 701 - RNA, 21 nt, RNAi-sense strand
uugcuacaagugguugguguu

SEQ ID NO: 702 - RNA, 21 nt, RNAi-antisense strand
caccaaccacuuguagcaauu

SEQ ID NO: 703 - DNA, 21 bp, Homo sapiens
caagtggttggtgtggtctct

SEQ ID NO: 704 - RNA, 21 nt, RNAi-sense strand
agugguugguguggucucuuu

SEQ ID NO: 705 - RNA, 21 nt, RNAi-antisense strand
agagaccacaccaaccacuuu

SEQ ID NO: 706 - DNA, 21 bp, Homo sapiens
caagagatgtgaagcgcctgg

SEQ ID NO: 707 - RNA, 21 nt, RNAi-sense strand
agagaugugaagcgccugguu

SEQ ID NO: 708 - RNA, 21 nt, RNAi-antisense strand
ccaggcgcuucacaucucuuu

SEQ ID NO: 709 - DNA, 21 bp, Homo sapiens
cacttgtcatcttctctccag

SEQ ID NO: 710 - RNA, 21 nt, RNAi-sense strand
cuugucaucuucucuccaguu

SEQ ID NO: 711 - RNA, 21 nt, RNAi-antisense strand
cuggagagaagaugacaaguu

SEQ ID NO: 712 - DNA, 21 bp, Homo sapiens
catacaaagcagaagagaggt

SEQ ID NO: 713 - RNA, 21 nt, RNAi-sense strand
uacaaagcagaagagagguuu

SEQ ID NO: 714 - RNA, 21 nt, RNAi-antisense strand
accucucuucugcuuuguauu

SEQ ID NO: 715 - DNA, 21 bp, Homo sapiens
caaagcagaagagaggtgtca

SEQ ID NO: 716 - RNA, 21 nt, RNAi-sense strand
aagcagaagagaggugucauu

SEQ ID NO: 717 - RNA, 21 nt, RNAi-antisense strand
ugacaccucucuucugcuuuu

SEQ ID NO: 718 - DNA, 21 bp, Homo sapiens
cagaagagaggtgtcaggaac

SEQ ID NO: 719 - RNA, 21 nt, RNAi-sense strand
gaagagaggugucaggaacuu

SEQ ID NO: 720 - RNA, 21 nt, RNAi-antisense strand
guuccugacaccucucuucuu

SEQ ID NO: 721 - DNA, 21 bp, Homo sapiens
caggaactgtttgatgcacac

SEQ ID NO: 722 - RNA, 21 nt, RNAi-sense strand
ggaacuguuugaugcacacuu

SEQ ID NO: 723 - RNA, 21 nt, RNAi-antisense strand
gugugcaucaaacaguuccuu

SEQ ID NO: 724 - DNA, 21 bp, Homo sapiens
cacaccaggatttacattcag

SEQ ID NO: 725 - RNA, 21 nt, RNAi-sense strand
caccaggauuuacauucaguu

SEQ ID NO: 726 - RNA, 21 nt, RNAi-antisense strand
cugaauguaaauccugguguu

SEQ ID NO: 727 - DNA, 21 bp, Homo sapiens
caccaggatttacattcagag

SEQ ID NO: 728 - RNA, 21 nt, RNAi-sense strand
ccaggauuuacauucagaguu

SEQ ID NO: 729 - RNA, 21 nt, RNAi-antisense strand
cucugaauguaaauccugguu

SEQ ID NO: 730 - DNA, 21 bp, Homo sapiens
caggatttacattcagaggct

SEQ ID NO: 731 - RNA, 21 nt, RNAi-sense strand
ggauuuacauucagaggcuuu

SEQ ID NO: 732 - RNA, 21 nt, RNAi-antisense strand
agccucugaauguaaauccuu

SEQ ID NO: 733 - DNA, 21 bp, Homo sapiens
cattcagaggcttggttcttg

SEQ ID NO: 734 - RNA, 21 nt, RNAi-sense strand
uucagaggcuugguucuuguu

SEQ ID NO: 735 - RNA, 21 nt, RNAi-antisense strand
caagaaccaagccucugaauu

SEQ ID NO: 736 - DNA, 21 bp, Homo sapiens
catctgtgccatgtttgtcat

SEQ ID NO: 737 - RNA, 21 nt, RNAi-sense strand
ucugugccauguuugucauuu

SEQ ID NO: 738 - RNA, 21 nt, RNAi-antisense strand
augacaaacauggcacagauu

SEQ ID NO: 739 - DNA, 21 bp, Homo sapiens
catgtttgtcatcatcgttgc

SEQ ID NO: 740 - RNA, 21 nt, RNAi-sense strand
uguuugucaucaucguugcuu

SEQ ID NO: 741 - RNA, 21 nt, RNAi-antisense strand
gcaacgaugaugacaaacauu

SEQ ID NO: 742 - DNA, 21 bp, Homo sapiens
caggttggtttggcactgtcc

SEQ ID NO: 743 - RNA, 21 nt, RNAi-sense strand
gguugguuuggcacuguccuu

SEQ ID NO: 744 - RNA, 21 nt, RNAi-antisense strand
ggacagugccaaaccaaccuu

SEQ ID NO: 745 - DNA, 21 bp, Homo sapiens
cagtggtgtgttcgacaaagt

SEQ ID NO: 746 - RNA, 21 nt, RNAi-sense strand
gugguguguucgacaaaguuu

SEQ ID NO: 747 - RNA, 21 nt, RNAi-antisense strand
acuuugucgaacacaccacuu

SEQ ID NO: 748 - DNA, 21 bp, Homo sapiens
caaagtgctgaagttgagaat

SEQ ID NO: 749 - RNA, 21 nt, RNAi-sense strand
aagugcugaaguugagaauuu

SEQ ID NO: 750 - RNA, 21 nt, RNAi-antisense strand
auucucaacuucagcacuuuu

SEQ ID NO: 751 - DNA, 21 bp, Homo sapiens
cattgaatacacagaccttga

SEQ ID NO: 752 - RNA, 21 nt, RNAi-sense strand
uugaauacacagaccuugauu

SEQ ID NO: 753 - RNA, 21 nt, RNAi-antisense strand
ucaaggucuguguauucaauu

SEQ ID NO: 754 - DNA, 21 bp, Homo sapiens
catgaaggagtgataatcttt

SEQ ID NO: 755 - RNA, 21 nt, RNAi-sense strand
ugaaggagugauaaucuuuuu

SEQ ID NO: 756 - RNA, 21 nt, RNAi-antisense strand
aaagauuaucacuccuucauu

SEQ ID NO: 757 - DNA, 21 bp, Homo sapiens
caatgtgaacttcatgtacag

SEQ ID NO: 758 - RNA, 21 nt, RNAi-sense strand
augugaacuucauguacaguu

SEQ ID NO: 759 - RNA, 21 nt, RNAi-antisense strand
cuguacaugaaguucacauuu

SEQ ID NO: 760 - DNA, 21 bp, Homo sapiens
catctgacagcactcattaaa

SEQ ID NO: 761 - RNA, 21 nt, RNAi-sense strand
ucugacagcacucauuaaauu

SEQ ID NO: 762 - RNA, 21 nt, RNAi-antisense strand
uuuaaugagugcugucagauu

SEQ ID NO: 763 - DNA, 21 bp, Homo sapiens
cagcactcattaaatcacaag

SEQ ID NO: 764 - RNA, 21 nt, RNAi-sense strand
gcacucauuaaaucacaaguu

SEQ ID NO: 765 - RNA, 21 nt, RNAi-antisense strand
cuugugauuuaaugagugcuu

SEQ ID NO: 766 - DNA, 21 bp, Homo sapiens
caactgaaattggacttcacg

SEQ ID NO: 767 - RNA, 21 nt, RNAi-sense strand
acugaaauuggacuucacguu

SEQ ID NO: 768 - RNA, 21 nt, RNAi-antisense strand
cgugaaguccaauuucaguuu

SEQ ID NO: 769 - DNA, 21 bp, Homo sapiens
caatcatacctcaggaacctg

SEQ ID NO: 770 - RNA, 21 nt, RNAi-sense strand
aucauaccucaggaaccuguu

SEQ ID NO: 771 - RNA, 21 nt, RNAi-antisense strand
cagguuccugagguaugauuu

SEQ ID NO: 772 - DNA, 21 bp, Homo sapiens
cacacggatgaggaactgtgg

SEQ ID NO: 773 - RNA, 21 nt, RNAi-sense strand
cacggaugaggaacugugguu

SEQ ID NO: 774 - RNA, 21 nt, RNAi-antisense strand
ccacaguuccucauccguguu

SEQ ID NO: 775 - DNA, 21 bp, Homo sapiens
cacggatgaggaactgtggaa

SEQ ID NO: 776 - RNA, 21 nt, RNAi-sense strand
cggaugaggaacuguggaauu

SEQ ID NO: 777 - RNA, 21 nt, RNAi-antisense strand
uuccacaguuccucauccguu

SEQ ID NO: 778 - DNA, 21 bp, Homo sapiens
caagaggtacaacttaaagaa

SEQ ID NO: 779 - RNA, 21 nt, RNAi-sense strand
agagguacaacuuaaagaauu

SEQ ID NO: 780 - RNA, 21 nt, RNAi-antisense strand
uucuuuaaguuguaccucuuu

SEQ ID NO: 781 - DNA, 21 bp, Homo sapiens
cattgaagatcttcctggtaa

SEQ ID NO: 782 - RNA, 21 nt, RNAi-sense strand
uugaagaucuuccugguaauu

SEQ ID NO: 783 - RNA, 21 nt, RNAi-antisense strand
uuaccaggaagaucuucaauu

SEQ ID NO: 784 - DNA, 21 bp, Homo sapiens
caaagacaactggtgtgcctt

SEQ ID NO: 785 - RNA, 21 nt, RNAi-sense strand
aagacaacuggugugccuuuu

SEQ ID NO: 786 - RNA, 21 nt, RNAi-antisense strand
aaggcacaccaguugucuuuu

SEQ ID NO: 787 - DNA, 21 bp, Homo sapiens
caactggtgtgccttgccagg

SEQ ID NO: 788 - RNA, 21 nt, RNAi-sense strand
acuggugugccuugccagguu

SEQ ID NO: 789 - RNA, 21 nt, RNAi-antisense strand
ccuggcaaggcacaccaguuu

SEQ ID NO: 790 - DNA, 21 bp, Homo sapiens
caaatgtggatccaagaactg

SEQ ID NO: 791 - RNA, 21 nt, RNAi-sense strand
aauguggauccaagaacuguu

SEQ ID NO: 792 - RNA, 21 nt, RNAi-antisense strand
caguucuuggauccacauuuu

SEQ ID NO: 793 - DNA, 21 bp, Homo sapiens
caagaactgatgagttaatac

SEQ ID NO: 794 - RNA, 21 nt, RNAi-sense strand
agaacugaugaguuaauacuu

SEQ ID NO: 795 - RNA, 21 nt, RNAi-antisense strand
guauuaacucaucaguucuuu

SEQ ID NO: 796 - DNA, 21 bp, Homo sapiens
cactgcaccgtgctaaccatt

SEQ ID NO: 797 - RNA, 21 nt, RNAi-sense strand
cugcaccgugcuaaccauuuu

SEQ ID NO: 798 - RNA, 21 nt, RNAi-antisense strand
aaugguuagcacggugcaguu

SEQ ID NO: 799 - DNA, 21 bp, Homo sapiens
caccgtgctaaccattgcaca

SEQ ID NO: 800 - RNA, 21 nt, RNAi-sense strand
ccgugcuaaccauugcacauu

SEQ ID NO: 801 - RNA, 21 nt, RNAi-antisense strand
ugugcaaugguuagcacgguu

SEQ ID NO: 802 - DNA, 21 bp, Homo sapiens
cattgcacacagattgaacac

SEQ ID NO: 803 - RNA, 21 nt, RNAi-sense strand
uugcacacagauugaacacuu

SEQ ID NO: 804 - RNA, 21 nt, RNAi-antisense strand
guguucaaucugugugcaauu

SEQ ID NO: 805 - DNA, 21 bp, Homo sapiens
cacacagattgaacaccatta

SEQ ID NO: 806 - RNA, 21 nt, RNAi-sense strand
cacagauugaacaccauuauu

SEQ ID NO: 807 - RNA, 21 nt, RNAi-antisense strand
uaaugguguucaaucuguguu

SEQ ID NO: 808 - DNA, 21 bp, Homo sapiens
cacagattgaacaccattatt

SEQ ID NO: 809 - RNA, 21 nt, RNAi-sense strand
cagauugaacaccauuauuuu

SEQ ID NO: 810 - RNA, 21 nt, RNAi-antisense strand
aauaaugguguucaaucuguu

SEQ ID NO: 811 - DNA, 21 bp, Homo sapiens
cagattgaacaccattattga

SEQ ID NO: 812 - RNA, 21 nt, RNAi-sense strand
gauugaacaccauuauugauu

SEQ ID NO: 813 - RNA, 21 nt, RNAi-antisense strand
ucaauaaugguguucaaucuu

SEQ ID NO: 814 - DNA, 21 bp, Homo sapiens
caccattattgacagcgacaa

SEQ ID NO: 815 - RNA, 21 nt, RNAi-sense strand
ccauuauugacagcgacaauu

SEQ ID NO: 816 - RNA, 21 nt, RNAi-antisense strand
uugucgcugucaauaaugguu

SEQ ID NO: 817 - DNA, 21 bp, Homo sapiens
cattattgacagcgacaagat

SEQ ID NO: 818 - RNA, 21 nt, RNAi-sense strand
uuauugacagcgacaagauuu

SEQ ID NO: 819 - RNA, 21 nt, RNAi-antisense strand
aucuugucgcugucaauaauu

SEQ ID NO: 820 - DNA, 21 bp, Homo sapiens
caggaagactgaaagaatatg

SEQ ID NO: 821 - RNA, 21 nt, RNAi-sense strand
ggaagacugaaagaauauguu

SEQ ID NO: 822 - RNA, 21 nt, RNAi-antisense strand
cauauucuuucagucuuccuu

SEQ ID NO: 823 - DNA, 21 bp, Homo sapiens
cacatattggtcacactgacc

SEQ ID NO: 824 - RNA, 21 nt, RNAi-sense strand
cauauuggucacacugaccuu

SEQ ID NO: 825 - RNA, 21 nt, RNAi-antisense strand
ggucagugugaccaauauguu

SEQ ID NO: 826 - DNA, 21 bp, Homo sapiens
catattggtcacactgaccac

SEQ ID NO: 827 - RNA, 21 nt, RNAi-sense strand
uauuggucacacugaccacuu

SEQ ID NO: 828 - RNA, 21 nt, RNAi-antisense strand
guggucagugugaccaauauu

SEQ ID NO: 829 - DNA, 21 bp, Homo sapiens
cacactgaccacatggttaca

SEQ ID NO: 830 - RNA, 21 nt, RNAi-sense strand
cacugaccacaugguuacauu

SEQ ID NO: 831 - RNA, 21 nt, RNAi-antisense strand
uguaaccauguggucaguguu

SEQ ID NO: 832 - DNA, 21 bp, Homo sapiens
cactgaccacatggttacaaa

SEQ ID NO: 833 - RNA, 21 nt, RNAi-sense strand
cugaccacaugguuacaaauu

SEQ ID NO: 834 - RNA, 21 nt, RNAi-antisense strand
uuuguaaccauguggucaguu

SEQ ID NO: 835 - DNA, 21 bp, Homo sapiens
cacatggttacaaacacttcc

SEQ ID NO: 836 - RNA, 21 nt, RNAi-sense strand
caugguuacaaacacuuccuu

SEQ ID NO: 837 - RNA, 21 nt, RNAi-antisense strand
ggaaguguuuguaaccauguu

SEQ ID NO: 838 - DNA, 21 bp, Homo sapiens
catggttacaaacacttccaa

SEQ ID NO: 839 - RNA, 21 nt, RNAi-sense strand
ugguuacaaacacuuccaauu

SEQ ID NO: 840 - RNA, 21 nt, RNAi-antisense strand
uuggaaguguuuguaaccauu

SEQ ID NO: 841 - DNA, 21 bp, Homo sapiens
caaacacttccaatggacagc

SEQ ID NO: 842 - RNA, 21 nt, RNAi-sense strand
aacacuuccaauggacagcuu

SEQ ID NO: 843 - RNA, 21 nt, RNAi-antisense strand
gcuguccauuggaaguguuuu

SEQ ID NO: 844 - DNA, 21 bp, Homo sapiens
cagcactgtgaatccaaccaa

SEQ ID NO: 845 - RNA, 21 nt, RNAi-sense strand
gcacugugaauccaaccaauu

SEQ ID NO: 846 - RNA, 21 nt, RNAi-antisense strand
uugguuggauucacagugcuu

SEQ ID NO: 847 - DNA, 21 bp, Homo sapiens
caagtccgttccgaaggcatt

SEQ ID NO: 848 - RNA, 21 nt, RNAi-sense strand
aguccguuccgaaggcauuuu

SEQ ID NO: 849 - RNA, 21 nt, RNAi-antisense strand
aaugccuucggaacggacuuu

SEQ ID NO: 850 - DNA, 21 bp, Homo sapiens
catacaagatgctagttcatt

SEQ ID NO: 851 - RNA, 21 nt, RNAi-sense strand
uacaagaugcuaguucauuuu

SEQ ID NO: 852 - RNA, 21 nt, RNAi-antisense strand
aaugaacuagcaucuuguauu

SEQ ID NO: 853 - DNA, 21 bp, Homo sapiens
caagatgctagttcatttgaa

SEQ ID NO: 854 - RNA, 21 nt, RNAi-sense strand
agaugcuaguucauuugaauu

SEQ ID NO: 855 - RNA, 21 nt, RNAi-antisense strand
uucaaaugaacuagcaucuuu

SEQ ID NO: 856 - DNA, 21 bp, Homo sapiens
gacgcgaacatctgctcacgc

SEQ ID NO: 857 - RNA, 21 nt, RNAi-sense strand
cgcgaacaucugcucacgcuu

SEQ ID NO: 858 - RNA, 21 nt, RNAi-antisense strand
gcgugagcagauguucgcguu

SEQ ID NO: 859 - DNA, 21 bp, Homo sapiens
gaacatctgctcacgcgtgtt

SEQ ID NO: 860 - RNA, 21 nt, RNAi-sense strand
acaucugcucacgcguguuuu

SEQ ID NO: 861 - RNA, 21 nt, RNAi-antisense strand
aacacgcgugagcagauguuu

SEQ ID NO: 862 - DNA, 21 bp, Homo sapiens
gagattagaggaagatgatat

SEQ ID NO: 863 - RNA, 21 nt, RNAi-sense strand
gauuagaggaagaugauauuu

SEQ ID NO: 864 - RNA, 21 nt, RNAi-antisense strand
auaucaucuuccucuaaucuu

SEQ ID NO: 865 - DNA, 21 bp, Homo sapiens
gattagaggaagatgatatgt

SEQ ID NO: 866 - RNA, 21 nt, RNAi-sense strand
uuagaggaagaugauauguuu

SEQ ID NO: 867 - RNA, 21 nt, RNAi-antisense strand
acauaucaucuuccucuaauu

SEQ ID NO: 868 - DNA, 21 bp, Homo sapiens
gaggaagatgatatgtattca

SEQ ID NO: 869 - RNA, 21 nt, RNAi-sense strand
ggaagaugauauguauucauu

SEQ ID NO: 870 - RNA, 21 nt, RNAi-antisense strand
ugaauacauaucaucuuccuu

SEQ ID NO: 871 - DNA, 21 bp, Homo sapiens
gaagatgatatgtattcagtg

SEQ ID NO: 872 - RNA, 21 nt, RNAi-sense strand
agaugauauguauucaguguu

SEQ ID NO: 873 - RNA, 21 nt, RNAi-antisense strand
cacugaauacauaucaucuuu

SEQ ID NO: 874 - DNA, 21 bp, Homo sapiens
gatgatatgtattcagtgctg

SEQ ID NO: 875 - RNA, 21 nt, RNAi-sense strand
ugauauguauucagugcuguu

SEQ ID NO: 876 - RNA, 21 nt, RNAi-antisense strand
cagcacugaauacauaucauu

SEQ ID NO: 877 - DNA, 21 bp, Homo sapiens
gatatgtattcagtgctgcca

SEQ ID NO: 878 - RNA, 21 nt, RNAi-sense strand
uauguauucagugcugccauu

SEQ ID NO: 879 - RNA, 21 nt, RNAi-antisense strand
uggcagcacugaauacauauu

SEQ ID NO: 880 - DNA, 21 bp, Homo sapiens
gaagaccgctcacagcacctt

SEQ ID NO: 881 - RNA, 21 nt, RNAi-sense strand
agaccgcucacagcaccuuuu

SEQ ID NO: 882 - RNA, 21 nt, RNAi-antisense strand
aaggugcugugagcggucuuu

SEQ ID NO: 883 - DNA, 21 bp, Homo sapiens
gaccgctcacagcaccttgga

SEQ ID NO: 884 - RNA, 21 nt, RNAi-sense strand
ccgcucacagcaccuuggauu

SEQ ID NO: 885 - RNA, 21 nt, RNAi-antisense strand
uccaaggugcugugagcgguu

SEQ ID NO: 886 - DNA, 21 bp, Homo sapiens
gagctgagaatgacgcacaga

SEQ ID NO: 887 - RNA, 21 nt, RNAi-sense strand
gcugagaaugacgcacagauu

SEQ ID NO: 888 - RNA, 21 nt, RNAi-antisense strand
ucugugcgucauucucagcuu

SEQ ID NO: 889 - DNA, 21 bp, Homo sapiens
gagaatgacgcacagaagcct

SEQ ID NO: 890 - RNA, 21 nt, RNAi-sense strand
gaaugacgcacagaagccuuu

SEQ ID NO: 891 - RNA, 21 nt, RNAi-antisense strand
aggcuucugugcgucauucuu

SEQ ID NO: 892 - DNA, 21 bp, Homo sapiens
gaatgacgcacagaagccttc

SEQ ID NO: 893 - RNA, 21 nt, RNAi-sense strand
augacgcacagaagccuucuu

SEQ ID NO: 894 - RNA, 21 nt, RNAi-antisense strand
gaaggcuucugugcgucauuu

SEQ ID NO: 895 - DNA, 21 bp, Homo sapiens
gacgcacagaagccttcttta

SEQ ID NO: 896 - RNA, 21 nt, RNAi-sense strand
cgcacagaagccuucuuuauu

SEQ ID NO: 897 - RNA, 21 nt, RNAi-antisense strand
uaaagaaggcuucugugcguu

SEQ ID NO: 898 - DNA, 21 bp, Homo sapiens
gaagccttctttaacaagagc

SEQ ID NO: 899 - RNA, 21 nt, RNAi-sense strand
agccuucuuuaacaagagcuu

SEQ ID NO: 900 - RNA, 21 nt, RNAi-antisense strand
gcucuuguuaaagaaggcuuu

SEQ ID NO: 901 - DNA, 21 bp, Homo sapiens
gagcaatcataaagtgttact

SEQ ID NO: 902 - RNA, 21 nt, RNAi-sense strand
gcaaucauaaaguguuacuuu

SEQ ID NO: 903 - RNA, 21 nt, RNAi-antisense strand
aguaacacuuuaugauugcuu

SEQ ID NO: 904 - DNA, 21 bp, Homo sapiens
gaggaaagtgccaaagtaatc

SEQ ID NO: 905 - RNA, 21 nt, RNAi-sense strand
ggaaagugccaaaguaaucuu

SEQ ID NO: 906 - RNA, 21 nt, RNAi-antisense strand
gauuacuuuggcacuuuccuu

SEQ ID NO: 907 - DNA, 21 bp, Homo sapiens
gaaagtgccaaagtaatccag

SEQ ID NO: 908 - RNA, 21 nt, RNAi-sense strand
aagugccaaaguaauccaguu

SEQ ID NO: 909 - RNA, 21 nt, RNAi-antisense strand
cuggauuacuuuggcacuuuu

SEQ ID NO: 910 - DNA, 21 bp, Homo sapiens
gattctgtggctttgaacaca

SEQ ID NO: 911 - RNA, 21 nt, RNAi-sense strand
uucuguggcuuugaacacauu

SEQ ID NO: 912 - RNA, 21 nt, RNAi-antisense strand
uguguucaaagccacagaauu

SEQ ID NO: 913 - DNA, 21 bp, Homo sapiens
gaacacagcgtacgcctatgc

SEQ ID NO: 914 - RNA, 21 nt, RNAi-sense strand
acacagcguacgccuaugcuu

SEQ ID NO: 915 - RNA, 21 nt, RNAi-antisense strand
gcauaggcguacgcuguguuu

SEQ ID NO: 916 - DNA, 21 bp, Homo sapiens
gatgaggttacgagtagccat

SEQ ID NO: 917 - RNA, 21 nt, RNAi-sense strand
ugagguuacgaguagccauuu

SEQ ID NO: 918 - RNA, 21 nt, RNAi-antisense strand
auggcuacucguaaccucauu

SEQ ID NO: 919 - DNA, 21 bp, Homo sapiens
gaggttacgagtagccatgtg

SEQ ID NO: 920 - RNA, 21 nt, RNAi-sense strand
gguuacgaguagccauguguu

SEQ ID NO: 921 - RNA, 21 nt, RNAi-antisense strand
cacauggcuacucguaaccuu

SEQ ID NO: 922 - DNA, 21 bp, Homo sapiens
gagtagccatgtgccatatga

SEQ ID NO: 923 - RNA, 21 nt, RNAi-sense strand
guagccaugugccauaugauu

SEQ ID NO: 924 - RNA, 21 nt, RNAi-antisense strand
ucauauggcacauggcuacuu

SEQ ID NO: 925 - DNA, 21 bp, Homo sapiens
gatttatcggaaggcacttcg

SEQ ID NO: 926 - RNA, 21 nt, RNAi-sense strand
uuuaucggaaggcacuucguu

SEQ ID NO: 927 - RNA, 21 nt, RNAi-antisense strand
cgaagugccuuccgauaaauu

SEQ ID NO: 928 - DNA, 21 bp, Homo sapiens
gaaggcacttcgtcttagtaa

SEQ ID NO: 929 - RNA, 21 nt, RNAi-sense strand
aggcacuucgucuuaguaauu

SEQ ID NO: 930 - RNA, 21 nt, RNAi-antisense strand
uuacuaagacgaagugccuuu

SEQ ID NO: 931 - DNA, 21 bp, Homo sapiens
gaagacaaccacaggccagat

SEQ ID NO: 932 - RNA, 21 nt, RNAi-sense strand
agacaaccacaggccagauuu

SEQ ID NO: 933 - RNA, 21 nt, RNAi-antisense strand
aucuggccugugguugucuuu

SEQ ID NO: 934 - DNA, 21 bp, Homo sapiens
gacaaccacaggccagatagt

SEQ ID NO: 935 - RNA, 21 nt, RNAi-sense strand
caaccacaggccagauaguuu

SEQ ID NO: 936 - RNA, 21 nt, RNAi-antisense strand
acuaucuggccugugguuguu

SEQ ID NO: 937 - DNA, 21 bp, Homo sapiens
gatagtcaatctgctgtccaa

SEQ ID NO: 938 - RNA, 21 nt, RNAi-sense strand
uagucaaucugcuguccaauu

SEQ ID NO: 939 - RNA, 21 nt, RNAi-antisense strand
uuggacagcagauugacuauu

SEQ ID NO: 940 - DNA, 21 bp, Homo sapiens
gatgtgaacaagtttgatcag

SEQ ID NO: 941 - RNA, 21 nt, RNAi-sense strand
ugugaacaaguuugaucaguu

SEQ ID NO: 942 - RNA, 21 nt, RNAi-antisense strand
cugaucaaacuuguucacauu

SEQ ID NO: 943 - DNA, 21 bp, Homo sapiens
gaacaagtttgatcaggtgac

SEQ ID NO: 944 - RNA, 21 nt, RNAi-sense strand
acaaguuugaucaggugacuu

SEQ ID NO: 945 - RNA, 21 nt, RNAi-antisense strand
gucaccugaucaaacuuguuu

SEQ ID NO: 946 - DNA, 21 bp, Homo sapiens
gatcaggtgacagtgttctta

SEQ ID NO: 947 - RNA, 21 nt, RNAi-sense strand
ucaggugacaguguucuuauu

SEQ ID NO: 948 - RNA, 21 nt, RNAi-antisense strand
uaagaacacugucaccugauu

SEQ ID NO: 949 - DNA, 21 bp, Homo sapiens
gacagtgttcttacacttcct

SEQ ID NO: 950 - RNA, 21 nt, RNAi-sense strand
caguguucuuacacuuccuuu

SEQ ID NO: 951 - RNA, 21 nt, RNAi-antisense strand
aggaaguguaagaacacuguu

SEQ ID NO: 952 - DNA, 21 bp, Homo sapiens
gatggagataggaatatcgtg

SEQ ID NO: 953 - RNA, 21 nt, RNAi-sense strand
uggagauaggaauaucguguu

SEQ ID NO: 954 - RNA, 21 nt, RNAi-antisense strand
cacgauauuccuaucuccauu

SEQ ID NO: 955 - DNA, 21 bp, Homo sapiens
gagataggaatatcgtgcctt

SEQ ID NO: 956 - RNA, 21 nt, RNAi-sense strand
gauaggaauaucgugccuuuu

SEQ ID NO: 957 - RNA, 21 nt, RNAi-antisense strand
aaggcacgauauuccuaucuu

SEQ ID NO: 958 - DNA, 21 bp, Homo sapiens
gataggaatatcgtgccttgc

SEQ ID NO: 959 - RNA, 21 nt, RNAi-sense strand
uaggaauaucgugccuugcuu

SEQ ID NO: 960 - RNA, 21 nt, RNAi-antisense strand
gcaaggcacgauauuccuauu

SEQ ID NO: 961 - DNA, 21 bp, Homo sapiens
gatggcagttctaatcattct

SEQ ID NO: 962 - RNA, 21 nt, RNAi-sense strand
uggcaguucuaaucauucuuu

SEQ ID NO: 963 - RNA, 21 nt, RNAi-antisense strand
agaaugauuagaacugccauu

SEQ ID NO: 964 - DNA, 21 bp, Homo sapiens
gaagttgttctcatcactgag

SEQ ID NO: 965 - RNA, 21 nt, RNAi-sense strand
aguuguucucaucacugaguu

SEQ ID NO: 966 - RNA, 21 nt, RNAi-antisense strand
cucagugaugagaacaacuuu

SEQ ID NO: 967 - DNA, 21 bp, Homo sapiens
gatgccaggatcaggaccatg

SEQ ID NO: 968 - RNA, 21 nt, RNAi-sense strand
ugccaggaucaggaccauguu

SEQ ID NO: 969 - RNA, 21 nt, RNAi-antisense strand
caugguccugauccuggcauu

SEQ ID NO: 970 - DNA, 21 bp, Homo sapiens
gatcaggaccatgaatgaagt

SEQ ID NO: 971 - RNA, 21 nt, RNAi-sense strand
ucaggaccaugaaugaaguuu

SEQ ID NO: 972 - RNA, 21 nt, RNAi-antisense strand
acuucauucaugguccugauu

SEQ ID NO: 973 - DNA, 21 bp, Homo sapiens
gaccatgaatgaagttataac

SEQ ID NO: 974 - RNA, 21 nt, RNAi-sense strand
ccaugaaugaaguuauaacuu

SEQ ID NO: 975 - RNA, 21 nt, RNAi-antisense strand
guuauaacuucauucaugguu

SEQ ID NO: 976 - DNA, 21 bp, Homo sapiens
gaagttataactggtataagg

SEQ ID NO: 977 - RNA, 21 nt, RNAi-sense strand
aguuauaacugguauaagguu

SEQ ID NO: 978 - RNA, 21 nt, RNAi-antisense strand
ccuuauaccaguuauaacuuu

SEQ ID NO: 979 - DNA, 21 bp, Homo sapiens
gagaaagaaggagatttccaa

SEQ ID NO: 980 - RNA, 21 nt, RNAi-sense strand
gaaagaaggagauuuccaauu

SEQ ID NO: 981 - RNA, 21 nt, RNAi-antisense strand
uuggaaaucuccuucuuucuu

SEQ ID NO: 982 - DNA, 21 bp, Homo sapiens
gaaagaaggagatttccaaga

SEQ ID NO: 983 - RNA, 21 nt, RNAi-sense strand
aagaaggagauuuccaagauu

SEQ ID NO: 984 - RNA, 21 nt, RNAi-antisense strand
ucuuggaaaucuccuucuuuu

SEQ ID NO: 985 - DNA, 21 bp, Homo sapiens
gaaggagatttccaagattct

SEQ ID NO: 986 - RNA, 21 nt, RNAi-sense strand
aggagauuuccaagauucuuu

SEQ ID NO: 987 - RNA, 21 nt, RNAi-antisense strand
agaaucuuggaaaucuccuuu

SEQ ID NO: 988 - DNA, 21 bp, Homo sapiens
gagatttccaagattctgaga

SEQ ID NO: 989 - RNA, 21 nt, RNAi-sense strand
gauuuccaagauucugagauu

SEQ ID NO: 990 - RNA, 21 nt, RNAi-antisense strand
ucucagaaucuuggaaaucuu

SEQ ID NO: 991 - DNA, 21 bp, Homo sapiens
gatttccaagattctgagaag

SEQ ID NO: 992 - RNA, 21 nt, RNAi-sense strand
uuuccaagauucugagaaguu

SEQ ID NO: 993 - RNA, 21 nt, RNAi-antisense strand
cuucucagaaucuuggaaauu

SEQ ID NO: 994 - DNA, 21 bp, Homo sapiens
gattctgagaagttcctgcct

SEQ ID NO: 995 - RNA, 21 nt, RNAi-sense strand
uucugagaaguuccugccuuu

SEQ ID NO: 996 - RNA, 21 nt, RNAi-antisense strand
aggcaggaacuucucagaauu

SEQ ID NO: 997 - DNA, 21 bp, Homo sapiens
gaccttcaccacctacgtgct

SEQ ID NO: 998 - RNA, 21 nt, RNAi-sense strand
ccuucaccaccuacgugcuuu

SEQ ID NO: 999 - RNA, 21 nt, RNAi-antisense strand
agcacguagguggugaagguu

SEQ ID NO: 1000 - DNA, 21 bp, Homo sapiens
gatcacagccagccgcgtgtt

SEQ ID NO: 1001 - RNA, 21 nt, RNAi-sense strand
ucacagccagccgcguguuuu

SEQ ID NO: 1002 - RNA, 21 nt, RNAi-antisense strand
aacacgcggcuggcugugauu

SEQ ID NO: 1003 - DNA, 21 bp, Homo sapiens
gaggcaatcgtcagcatccga

SEQ ID NO: 1004 - RNA, 21 nt, RNAi-sense strand
ggcaaucgucagcauccgauu

SEQ ID NO: 1005 - RNA, 21 nt, RNAi-antisense strand
ucggaugcugacgauugccuu

SEQ ID NO: 1006 - DNA, 21 bp, Homo sapiens
gatgagatatcacagcgcaac

SEQ ID NO: 1007 - RNA, 21 nt, RNAi-sense strand
ugagauaucacagcgcaacuu

SEQ ID NO: 1008 - RNA, 21 nt, RNAi-antisense strand
guugcgcugugauaucucauu

SEQ ID NO: 1009 - DNA, 21 bp, Homo sapiens
gagatatcacagcgcaaccgt

SEQ ID NO: 1010 - RNA, 21 nt, RNAi-sense strand
gauaucacagcgcaaccguuu

SEQ ID NO: 1011 - RNA, 21 nt, RNAi-antisense strand
acgguugcgcugugauaucuu

SEQ ID NO: 1012 - DNA, 21 bp, Homo sapiens
gatatcacagcgcaaccgtca

SEQ ID NO: 1013 - RNA, 21 nt, RNAi-sense strand
uaucacagcgcaaccgucauu

SEQ ID NO: 1014 - RNA, 21 nt, RNAi-antisense strand
ugacgguugcgcugugauauu

SEQ ID NO: 1015 - DNA, 21 bp, Homo sapiens
gatggtgcatgtgcaggattt

SEQ ID NO: 1016 - RNA, 21 nt, RNAi-sense strand
uggugcaugugcaggauuuuu

SEQ ID NO: 1017 - RNA, 21 nt, RNAi-antisense strand
aaauccugcacaugcaccauu

SEQ ID NO: 1018 - DNA, 21 bp, Homo sapiens
gacctggcgaattgttagctg

SEQ ID NO: 1019 - RNA, 21 nt, RNAi-sense strand
ccuggcgaauuguuagcuguu

SEQ ID NO: 1020 - RNA, 21 nt, RNAi-antisense strand
cagcuaacaauucgccagguu

SEQ ID NO: 1021 - DNA, 21 bp, Homo sapiens
gaattgttagctgtggtcggc

SEQ ID NO: 1022 - RNA, 21 nt, RNAi-sense strand
auuguuagcuguggucggcuu

SEQ ID NO: 1023 - RNA, 21 nt, RNAi-antisense strand
gccgaccacagcuaacaauuu

SEQ ID NO: 1024 - DNA, 21 bp, Homo sapiens
gaagtcatcactgttaagtgc

SEQ ID NO: 1025 - RNA, 21 nt, RNAi-sense strand
agucaucacuguuaagugcuu

SEQ ID NO: 1026 - RNA, 21 nt, RNAi-antisense strand
gcacuuaacagugaugacuuu

SEQ ID NO: 1027 - DNA, 21 bp, Homo sapiens
gaagaattgcctatgtgtctc

SEQ ID NO: 1028 - RNA, 21 nt, RNAi-sense strand
agaauugccuaugugucucuu

SEQ ID NO: 1029 - RNA, 21 nt, RNAi-antisense strand
gagacacauaggcaauucuuu

SEQ ID NO: 1030 - DNA, 21 bp, Homo sapiens
gaattgcctatgtgtctcagc

SEQ ID NO: 1031 - RNA, 21 nt, RNAi-sense strand
auugccuaugugucucagcuu

SEQ ID NO: 1032 - RNA, 21 nt, RNAi-antisense strand
gcugagacacauaggcaauuu

SEQ ID NO: 1033 - DNA, 21 bp, Homo sapiens
gaactctgaggagtaatattt

SEQ ID NO: 1034 - RNA, 21 nt, RNAi-sense strand
acucugaggaguaauauuuuu

SEQ ID NO: 1035 - RNA, 21 nt, RNAi-antisense strand
aaauauuacuccucagaguuu

SEQ ID NO: 1036 - DNA, 21 bp, Homo sapiens
gatttacagctgttggaggat

SEQ ID NO: 1037 - RNA, 21 nt, RNAi-sense strand
uuuacagcuguuggaggauuu

SEQ ID NO: 1038 - RNA, 21 nt, RNAi-antisense strand
auccuccaacagcuguaaauu

SEQ ID NO: 1039 - DNA, 21 bp, Homo sapiens
gaggatggtgatctgactgtg

SEQ ID NO: 1040 - RNA, 21 nt, RNAi-sense strand
ggauggugaucugacuguguu

SEQ ID NO: 1041 - RNA, 21 nt, RNAi-antisense strand
cacagucagaucaccauccuu

SEQ ID NO: 1042 - DNA, 21 bp, Homo sapiens
gatggtgatctgactgtgata

SEQ ID NO: 1043 - RNA, 21 nt, RNAi-sense strand
uggugaucugacugugauauu

SEQ ID NO: 1044 - RNA, 21 nt, RNAi-antisense strand
uaucacagucagaucaccauu

SEQ ID NO: 1045 - DNA, 21 bp, Homo sapiens
gatctgactgtgataggagat

SEQ ID NO: 1046 - RNA, 21 nt, RNAi-sense strand
ucugacugugauaggagauuu

SEQ ID NO: 1047 - RNA, 21 nt, RNAi-antisense strand
aucuccuaucacagucagauu

SEQ ID NO: 1048 - DNA, 21 bp, Homo sapiens
gagcagtgtatcaagatgctg

SEQ ID NO: 1049 - RNA, 21 nt, RNAi-sense strand
gcaguguaucaagaugcuguu

SEQ ID NO: 1050 - RNA, 21 nt, RNAi-antisense strand
cagcaucuugauacacugcuu

SEQ ID NO: 1051 - DNA, 21 bp, Homo sapiens
gatgctgacatctatctcctg

SEQ ID NO: 1052 - RNA, 21 nt, RNAi-sense strand
ugcugacaucuaucuccuguu

SEQ ID NO: 1053 - RNA, 21 nt, RNAi-antisense strand
caggagauagaugucagcauu

SEQ ID NO: 1054 - DNA, 21 bp, Homo sapiens
gacatctatctcctggacgat

SEQ ID NO: 1055 - RNA, 21 nt, RNAi-sense strand
caucuaucuccuggacgauuu

SEQ ID NO: 1056 - RNA, 21 nt, RNAi-antisense strand
aucguccaggagauagauguu

SEQ ID NO: 1057 - DNA, 21 bp, Homo sapiens
gacgatcctctcagtgcagta

SEQ ID NO: 1058 - RNA, 21 nt, RNAi-sense strand
cgauccucucagugcaguauu

SEQ ID NO: 1059 - RNA, 21 nt, RNAi-antisense strand
uacugcacugagaggaucguu

SEQ ID NO: 1060 - DNA, 21 bp, Homo sapiens
gatcctctcagtgcagtagat

SEQ ID NO: 1061 - RNA, 21 nt, RNAi-sense strand
uccucucagugcaguagauuu

SEQ ID NO: 1062 - RNA, 21 nt, RNAi-antisense strand
aucuacugcacugagaggauu

SEQ ID NO: 1063 - DNA, 21 bp, Homo sapiens
gatgcggaagttagcagacac

SEQ ID NO: 1064 - RNA, 21 nt, RNAi-sense strand
ugcggaaguuagcagacacuu

SEQ ID NO: 1065 - RNA, 21 nt, RNAi-antisense strand
gugucugcuaacuuccgcauu

SEQ ID NO: 1066 - DNA, 21 bp, Homo sapiens
gaagttagcagacacttgttc

SEQ ID NO: 1067 - RNA, 21 nt, RNAi-sense strand
aguuagcagacacuuguucuu

SEQ ID NO: 1068 - RNA, 21 nt, RNAi-antisense strand
gaacaagugucugcuaacuuu

SEQ ID NO: 1069 - DNA, 21 bp, Homo sapiens
gacacttgttcgaactgtgta

SEQ ID NO: 1070 - RNA, 21 nt, RNAi-sense strand
cacuuguucgaacuguguauu

SEQ ID NO: 1071 - RNA, 21 nt, RNAi-antisense strand
uacacaguucgaacaaguguu

SEQ ID NO: 1072 - DNA, 21 bp, Homo sapiens
gactcatcagttgcagtacct

SEQ ID NO: 1073 - RNA, 21 nt, RNAi-sense strand
cucaucaguugcaguaccuuu

SEQ ID NO: 1074 - RNA, 21 nt, RNAi-antisense strand
agguacugcaacugaugaguu

SEQ ID NO: 1075 - DNA, 21 bp, Homo sapiens
gattctgatattgaaagatgg

SEQ ID NO: 1076 - RNA, 21 nt, RNAi-sense strand
uucugauauugaaagaugguu

SEQ ID NO: 1077 - RNA, 21 nt, RNAi-antisense strand
ccaucuuucaauaucagaauu

SEQ ID NO: 1078 - DNA, 21 bp, Homo sapiens
gacttacactgagttcctaaa

SEQ ID NO: 1079 - RNA, 21 nt, RNAi-sense strand
cuuacacugaguuccuaaauu

SEQ ID NO: 1080 - RNA, 21 nt, RNAi-antisense strand
uuuaggaacucaguguaaguu

SEQ ID NO: 1081 - DNA, 21 bp, Homo sapiens
gaaggataatgaggaaagtga

SEQ ID NO: 1082 - RNA, 21 nt, RNAi-sense strand
aggauaaugaggaaagugauu

SEQ ID NO: 1083 - RNA, 21 nt, RNAi-antisense strand
ucacuuuccucauuauccuuu

SEQ ID NO: 1084 - DNA, 21 bp, Homo sapiens
gataatgaggaaagtgaacaa

SEQ ID NO: 1085 - RNA, 21 nt, RNAi-sense strand
uaaugaggaaagugaacaauu

SEQ ID NO: 1086 - RNA, 21 nt, RNAi-antisense strand
uuguucacuuuccucauuauu

SEQ ID NO: 1087 - DNA, 21 bp, Homo sapiens
gaggaaagtgaacaacctcca

SEQ ID NO: 1088 - RNA, 21 nt, RNAi-sense strand
ggaaagugaacaaccuccauu

SEQ ID NO: 1089 - RNA, 21 nt, RNAi-antisense strand
uggagguuguucacuuuccuu

SEQ ID NO: 1090 - DNA, 21 bp, Homo sapiens
gaaagtgaacaacctccagtt

SEQ ID NO: 1091 - RNA, 21 nt, RNAi-sense strand
aagugaacaaccuccaguuuu

SEQ ID NO: 1092 - RNA, 21 nt, RNAi-antisense strand
aacuggagguuguucacuuuu

SEQ ID NO: 1093 - DNA, 21 bp, Homo sapiens
gaacaacctccagttccagga

SEQ ID NO: 1094 - RNA, 21 nt, RNAi-sense strand
acaaccuccaguuccaggauu

SEQ ID NO: 1095 - RNA, 21 nt, RNAi-antisense strand
uccuggaacuggagguuguuu

SEQ ID NO: 1096 - DNA, 21 bp, Homo sapiens
gaatcgtaccttctcagagtc

SEQ ID NO: 1097 - RNA, 21 nt, RNAi-sense strand
aucguaccuucucagagucuu

SEQ ID NO: 1098 - RNA, 21 nt, RNAi-antisense strand
gacucugagaagguacgauuu

SEQ ID NO: 1099 - DNA, 21 bp, Homo sapiens
gagtcttcggtttggtctcaa

SEQ ID NO: 1100 - RNA, 21 nt, RNAi-sense strand
gucuucgguuuggucucaauu

SEQ ID NO: 1101 - RNA, 21 nt, RNAi-antisense strand
uugagaccaaaccgaagacuu

SEQ ID NO: 1102 - DNA, 21 bp, Homo sapiens
gaaagatggtgctctggagag

SEQ ID NO: 1103 - RNA, 21 nt, RNAi-sense strand
aagauggugcucuggagaguu

SEQ ID NO: 1104 - RNA, 21 nt, RNAi-antisense strand
cucuccagagcaccaucuuuu

SEQ ID NO: 1105 - DNA, 21 bp, Homo sapiens
gatggtgctctggagagccaa

SEQ ID NO: 1106 - RNA, 21 nt, RNAi-sense strand
uggugcucuggagagccaauu

SEQ ID NO: 1107 - RNA, 21 nt, RNAi-antisense strand
uuggcucuccagagcaccauu

SEQ ID NO: 1108 - DNA, 21 bp, Homo sapiens
gagagccaagatacagagaat

SEQ ID NO: 1109 - RNA, 21 nt, RNAi-sense strand
gagccaagauacagagaauuu

SEQ ID NO: 1110 - RNA, 21 nt, RNAi-antisense strand
auucucuguaucuuggcucuu

SEQ ID NO: 1111 - DNA, 21 bp, Homo sapiens
gagccaagatacagagaatgt

SEQ ID NO: 1112 - RNA, 21 nt, RNAi-sense strand
gccaagauacagagaauguuu

SEQ ID NO: 1113 - RNA, 21 nt, RNAi-antisense strand
acauucucuguaucuuggcuu

SEQ ID NO: 1114 - DNA, 21 bp, Homo sapiens
gaggagaaccgttctgaagga

SEQ ID NO: 1115 - RNA, 21 nt, RNAi-sense strand
ggagaaccguucugaaggauu

SEQ ID NO: 1116 - RNA, 21 nt, RNAi-antisense strand
uccuucagaacgguucuccuu

SEQ ID NO: 1117 - DNA, 21 bp, Homo sapiens
gaattacttcagagctggtgc

SEQ ID NO: 1118 - RNA, 21 nt, RNAi-sense strand
auuacuucagagcuggugcuu

SEQ ID NO: 1119 - RNA, 21 nt, RNAi-antisense strand
gcaccagcucugaaguaauuu

SEQ ID NO: 1120 - DNA, 21 bp, Homo sapiens
gagctggtgctcactggattg

SEQ ID NO: 1121 - RNA, 21 nt, RNAi-sense strand
gcuggugcucacuggauuguu

SEQ ID NO: 1122 - RNA, 21 nt, RNAi-antisense strand
caauccagugagcaccagcuu

SEQ ID NO: 1123 - DNA, 21 bp, Homo sapiens
gattggtggctttcatactgg

SEQ ID NO: 1124 - RNA, 21 nt, RNAi-sense strand
uugguggcuuucauacugguu

SEQ ID NO: 1125 - RNA, 21 nt, RNAi-antisense strand
ccaguaugaaagccaccaauu

SEQ ID NO: 1126 - DNA, 21 bp, Homo sapiens
gaggaggaaatgtaaccgaga

SEQ ID NO: 1127 - RNA, 21 nt, RNAi-sense strand
ggaggaaauguaaccgagauu

SEQ ID NO: 1128 - RNA, 21 nt, RNAi-antisense strand
ucucgguuacauuuccuccuu

SEQ ID NO: 1129 - DNA, 21 bp, Homo sapiens
gaggaaatgtaaccgagaagc

SEQ ID NO: 1130 - RNA, 21 nt, RNAi-sense strand
ggaaauguaaccgagaagcuu

SEQ ID NO: 1131 - RNA, 21 nt, RNAi-antisense strand
gcuucucgguuacauuuccuu

SEQ ID NO: 1132 - DNA, 21 bp, Homo sapiens
gaaatgtaaccgagaagctag

SEQ ID NO: 1133 - RNA, 21 nt, RNAi-sense strand
aauguaaccgagaagcuaguu

SEQ ID NO: 1134 - RNA, 21 nt, RNAi-antisense strand
cuagcuucucgguuacauuuu

SEQ ID NO: 1135 - DNA, 21 bp, Homo sapiens
gagaagctagatcttaactgg

SEQ ID NO: 1136 - RNA, 21 nt, RNAi-sense strand
gaagcuagaucuuaacugguu

SEQ ID NO: 1137 - RNA, 21 nt, RNAi-antisense strand
ccaguuaagaucuagcuucuu

SEQ ID NO: 1138 - DNA, 21 bp, Homo sapiens
gaagctagatcttaactggta

SEQ ID NO: 1139 - RNA, 21 nt, RNAi-sense strand
agcuagaucuuaacugguauu

SEQ ID NO: 1140 - RNA, 21 nt, RNAi-antisense strand
uaccaguuaagaucuagcuuu

SEQ ID NO: 1141 - DNA, 21 bp, Homo sapiens
gatcttaactggtacttagga

SEQ ID NO: 1142 - RNA, 21 nt, RNAi-sense strand
ucuuaacugguacuuaggauu

SEQ ID NO: 1143 - RNA, 21 nt, RNAi-antisense strand
uccuaaguaccaguuaagauu

SEQ ID NO: 1144 - DNA, 21 bp, Homo sapiens
gatctctattggtattctacg

SEQ ID NO: 1145 - RNA, 21 nt, RNAi-sense strand
ucucuauugguauucuacguu

SEQ ID NO: 1146 - RNA, 21 nt, RNAi-antisense strand
cguagaauaccaauagagauu

SEQ ID NO: 1147 - DNA, 21 bp, Homo sapiens
gagtcaattctgaaagctccg

SEQ ID NO: 1148 - RNA, 21 nt, RNAi-sense strand
gucaauucugaaagcuccguu

SEQ ID NO: 1149 - RNA, 21 nt, RNAi-antisense strand
cggagcuuucagaauugacuu

SEQ ID NO: 1150 - DNA, 21 bp, Homo sapiens
gaaagctccggtattattctt

SEQ ID NO: 1151 - RNA, 21 nt, RNAi-sense strand
aagcuccgguauuauucuuuu

SEQ ID NO: 1152 - RNA, 21 nt, RNAi-antisense strand
aagaauaauaccggagcuuuu

SEQ ID NO: 1153 - DNA, 21 bp, Homo sapiens
gatagaaatccaataggaaga

SEQ ID NO: 1154 - RNA, 21 nt, RNAi-sense strand
uagaaauccaauaggaagauu

SEQ ID NO: 1155 - RNA, 21 nt, RNAi-antisense strand
ucuuccuauuggauuucuauu

SEQ ID NO: 1156 - DNA, 21 bp, Homo sapiens
gacattggacacttggatgat

SEQ ID NO: 1157 - RNA, 21 nt, RNAi-sense strand
cauuggacacuuggaugauuu

SEQ ID NO: 1158 - RNA, 21 nt, RNAi-antisense strand
aucauccaaguguccaauguu

SEQ ID NO: 1159 - DNA, 21 bp, Homo sapiens
gacacttggatgatttgctgc

SEQ ID NO: 1160 - RNA, 21 nt, RNAi-sense strand
cacuuggaugauuugcugcuu

SEQ ID NO: 1161 - RNA, 21 nt, RNAi-antisense strand
gcagcaaaucauccaaguguu

SEQ ID NO: 1162 - DNA, 21 bp, Homo sapiens
gatgatttgctgccgctgacg

SEQ ID NO: 1163 - RNA, 21 nt, RNAi-sense strand
ugauuugcugccgcugacguu

SEQ ID NO: 1164 - RNA, 21 nt, RNAi-antisense strand
cgucagcggcagcaaaucauu

SEQ ID NO: 1165 - DNA, 21 bp, Homo sapiens
gatttgctgccgctgacgttt

SEQ ID NO: 1166 - RNA, 21 nt, RNAi-sense strand
uuugcugccgcugacguuuuu

SEQ ID NO: 1167 - RNA, 21 nt, RNAi-antisense strand
aaacgucagcggcagcaaauu

SEQ ID NO: 1168 - DNA, 21 bp, Homo sapiens
gatttcatccagacattgcta

SEQ ID NO: 1169 - RNA, 21 nt, RNAi-sense strand
uuucauccagacauugcuauu

SEQ ID NO: 1170 - RNA, 21 nt, RNAi-antisense strand
uagcaaugucuggaugaaauu

SEQ ID NO: 1171 - DNA, 21 bp, Homo sapiens
gacattgctacaagtggttgg

SEQ ID NO: 1172 - RNA, 21 nt, RNAi-sense strand
cauugcuacaagugguugguu

SEQ ID NO: 1173 - RNA, 21 nt, RNAi-antisense strand
ccaaccacuuguagcaauguu

SEQ ID NO: 1174 - DNA, 21 bp, Homo sapiens
gattccttggatcgcaatacc

SEQ ID NO: 1175 - RNA, 21 nt, RNAi-sense strand
uuccuuggaucgcaauaccuu

SEQ ID NO: 1176 - RNA, 21 nt, RNAi-antisense strand
gguauugcgauccaaggaauu

SEQ ID NO: 1177 - DNA, 21 bp, Homo sapiens
gaaacgtcaagagatgtgaag

SEQ ID NO: 1178 - RNA, 21 nt, RNAi-sense strand
aacgucaagagaugugaaguu

SEQ ID NO: 1179 - RNA, 21 nt, RNAi-antisense strand
cuucacaucucuugacguuuu

SEQ ID NO: 1180 - DNA, 21 bp, Homo sapiens
gagatgtgaagcgcctggaat

SEQ ID NO: 1181 - RNA, 21 nt, RNAi-sense strand
gaugugaagcgccuggaauuu

SEQ ID NO: 1182 - RNA, 21 nt, RNAi-antisense strand
auuccaggcgcuucacaucuu

SEQ ID NO: 1183 - DNA, 21 bp, Homo sapiens
gatgtgaagcgcctggaatct

SEQ ID NO: 1184 - RNA, 21 nt, RNAi-sense strand
ugugaagcgccuggaaucuuu

SEQ ID NO: 1185 - RNA, 21 nt, RNAi-antisense strand
agauuccaggcgcuucacauu

SEQ ID NO: 1186 - DNA, 21 bp, Homo sapiens
gaagcgcctggaatctacaac

SEQ ID NO: 1187 - RNA, 21 nt, RNAi-sense strand
agcgccuggaaucuacaacuu

SEQ ID NO: 1188 - RNA, 21 nt, RNAi-antisense strand
guuguagauuccaggcgcuuu

SEQ ID NO: 1189 - DNA, 21 bp, Homo sapiens
gaatctacaactcggagtcca

SEQ ID NO: 1190 - RNA, 21 nt, RNAi-sense strand
aucuacaacucggaguccauu

SEQ ID NO: 1191 - RNA, 21 nt, RNAi-antisense strand
uggacuccgaguuguagauuu

SEQ ID NO: 1192 - DNA, 21 bp, Homo sapiens
gaagagaggtgtcaggaactg

SEQ ID NO: 1193 - RNA, 21 nt, RNAi-sense strand
agagaggugucaggaacuguu

SEQ ID NO: 1194 - RNA, 21 nt, RNAi-antisense strand
caguuccugacaccucucuuu

SEQ ID NO: 1195 - DNA, 21 bp, Homo sapiens
gagaggtgtcaggaactgttt

SEQ ID NO: 1196 - RNA, 21 nt, RNAi-sense strand
gaggugucaggaacuguuuuu

SEQ ID NO: 1197 - RNA, 21 nt, RNAi-antisense strand
aaacaguuccugacaccucuu

SEQ ID NO: 1198 - DNA, 21 bp, Homo sapiens
gaggtgtcaggaactgtttga

SEQ ID NO: 1199 - RNA, 21 nt, RNAi-sense strand
ggugucaggaacuguuugauu

SEQ ID NO: 1200 - RNA, 21 nt, RNAi-antisense strand
ucaaacaguuccugacaccuu

SEQ ID NO: 1201 - DNA, 21 bp, Homo sapiens
gaactgtttgatgcacaccag

SEQ ID NO: 1202 - RNA, 21 nt, RNAi-sense strand
acuguuugaugcacaccaguu

SEQ ID NO: 1203 - RNA, 21 nt, RNAi-antisense strand
cuggugugcaucaaacaguuu

SEQ ID NO: 1204 - DNA, 21 bp, Homo sapiens
gatgcacaccaggatttacat

SEQ ID NO: 1205 - RNA, 21 nt, RNAi-sense strand
ugcacaccaggauuuacauuu

SEQ ID NO: 1206 - RNA, 21 nt, RNAi-antisense strand
auguaaauccuggugugcauu

SEQ ID NO: 1207 - DNA, 21 bp, Homo sapiens
gatttacattcagaggcttgg

SEQ ID NO: 1208 - RNA, 21 nt, RNAi-sense strand
uuuacauucagaggcuugguu

SEQ ID NO: 1209 - RNA, 21 nt, RNAi-antisense strand
ccaagccucugaauguaaauu

SEQ ID NO: 1210 - DNA, 21 bp, Homo sapiens
gatgccatctgtgccatgttt

SEQ ID NO: 1211 - RNA, 21 nt, RNAi-sense strand
ugccaucugugccauguuuuu

SEQ ID NO: 1212 - RNA, 21 nt, RNAi-antisense strand
aaacauggcacagauggcauu

SEQ ID NO: 1213 - DNA, 21 bp, Homo sapiens
gatgtttcagtggtgtgttcg

SEQ ID NO: 1214 - RNA, 21 nt, RNAi-sense strand
uguuucagugguguguucguu

SEQ ID NO: 1215 - RNA, 21 nt, RNAi-antisense strand
cgaacacaccacugaaacauu

SEQ ID NO: 1216 - DNA, 21 bp, Homo sapiens
gacaaagtgctgaagttgaga

SEQ ID NO: 1217 - RNA, 21 nt, RNAi-sense strand
caaagugcugaaguugagauu

SEQ ID NO: 1218 - RNA, 21 nt, RNAi-antisense strand
ucucaacuucagcacuuuguu

SEQ ID NO: 1219 - DNA, 21 bp, Homo sapiens
gaagttgagaatatgatgatc

SEQ ID NO: 1220 - RNA, 21 nt, RNAi-sense strand
aguugagaauaugaugaucuu

SEQ ID NO: 1221 - RNA, 21 nt, RNAi-antisense strand
gaucaucauauucucaacuuu

SEQ ID NO: 1222 - DNA, 21 bp, Homo sapiens
gagaatatgatgatctcagta

SEQ ID NO: 1223 - RNA, 21 nt, RNAi-sense strand
gaauaugaugaucucaguauu

SEQ ID NO: 1224 - RNA, 21 nt, RNAi-antisense strand
uacugagaucaucauauucuu

SEQ ID NO: 1225 - DNA, 21 bp, Homo sapiens
gaatatgatgatctcagtaga

SEQ ID NO: 1226 - RNA, 21 nt, RNAi-sense strand
auaugaugaucucaguagauu

SEQ ID NO: 1227 - RNA, 21 nt, RNAi-antisense strand
ucuacugagaucaucauauuu

SEQ ID NO: 1228 - DNA, 21 bp, Homo sapiens
gaaggagtgataatctttgac

SEQ ID NO: 1229 - RNA, 21 nt, RNAi-sense strand
aggagugauaaucuuugacuu

SEQ ID NO: 1230 - RNA, 21 nt, RNAi-antisense strand
gucaaagauuaucacuccuuu

SEQ ID NO: 1231 - DNA, 21 bp, Homo sapiens
gagtgataatctttgacaatg

SEQ ID NO: 1232 - RNA, 21 nt, RNAi-sense strand
gugauaaucuuugacaauguu

SEQ ID NO: 1233 - RNA, 21 nt, RNAi-antisense strand
cauugucaaagauuaucacuu

SEQ ID NO: 1234 - DNA, 21 bp, Homo sapiens
gacaatgtgaacttcatgtac

SEQ ID NO: 1235 - RNA, 21 nt, RNAi-sense strand
caaugugaacuucauguacuu

SEQ ID NO: 1236 - RNA, 21 nt, RNAi-antisense strand
guacaugaaguucacauuguu

SEQ ID NO: 1237 - DNA, 21 bp, Homo sapiens
gaacttcatgtacagtccagg

SEQ ID NO: 1238 - RNA, 21 nt, RNAi-sense strand
acuucauguacaguccagguu

SEQ ID NO: 1239 - RNA, 21 nt, RNAi-antisense strand
ccuggacuguacaugaaguuu

SEQ ID NO: 1240 - DNA, 21 bp, Homo sapiens
gaagcatctgacagcactcat

SEQ ID NO: 1241 - RNA, 21 nt, RNAi-sense strand
agcaucugacagcacucauuu

SEQ ID NO: 1242 - RNA, 21 nt, RNAi-antisense strand
augagugcugucagaugcuuu

SEQ ID NO: 1243 - DNA, 21 bp, Homo sapiens
gacagcactcattaaatcaca

SEQ ID NO: 1244 - RNA, 21 nt, RNAi-sense strand
cagcacucauuaaaucacauu

SEQ ID NO: 1245 - RNA, 21 nt, RNAi-antisense strand
ugugauuuaaugagugcuguu

SEQ ID NO: 1246 - DNA, 21 bp, Homo sapiens
gattgataagatcttgacaac

SEQ ID NO: 1247 - RNA, 21 nt, RNAi-sense strand
uugauaagaucuugacaacuu

SEQ ID NO: 1248 - RNA, 21 nt, RNAi-antisense strand
guugucaagaucuuaucaauu

SEQ ID NO: 1249 - DNA, 21 bp, Homo sapiens
gataagatcttgacaactgaa

SEQ ID NO: 1250 - RNA, 21 nt, RNAi-sense strand
uaagaucuugacaacugaauu

SEQ ID NO: 1251 - RNA, 21 nt, RNAi-antisense strand
uucaguugucaagaucuuauu

SEQ ID NO: 1252 - DNA, 21 bp, Homo sapiens
gatcttgacaactgaaattgg

SEQ ID NO: 1253 - RNA, 21 nt, RNAi-sense strand
ucuugacaacugaaauugguu

SEQ ID NO: 1254 - RNA, 21 nt, RNAi-antisense strand
ccaauuucaguugucaagauu

SEQ ID NO: 1255 - DNA, 21 bp, Homo sapiens
gacaactgaaattggacttca

SEQ ID NO: 1256 - RNA, 21 nt, RNAi-sense strand
caacugaaauuggacuucauu

SEQ ID NO: 1257 - RNA, 21 nt, RNAi-antisense strand
ugaaguccaauuucaguuguu

SEQ ID NO: 1258 - DNA, 21 bp, Homo sapiens
gaaattggacttcacgattta

SEQ ID NO: 1259 - RNA, 21 nt, RNAi-sense strand
aauuggacuucacgauuuauu

SEQ ID NO: 1260 - RNA, 21 nt, RNAi-antisense strand
uaaaucgugaaguccaauuuu

SEQ ID NO: 1261 - DNA, 21 bp, Homo sapiens
gacttcacgatttaaggaaga

SEQ ID NO: 1262 - RNA, 21 nt, RNAi-sense strand
cuucacgauuuaaggaagauu

SEQ ID NO: 1263 - RNA, 21 nt, RNAi-antisense strand
ucuuccuuaaaucgugaaguu

SEQ ID NO: 1264 - DNA, 21 bp, Homo sapiens
gagcacacggatgaggaactg

SEQ ID NO: 1265 - RNA, 21 nt, RNAi-sense strand
gcacacggaugaggaacuguu

SEQ ID NO: 1266 - RNA, 21 nt, RNAi-antisense strand
caguuccucauccgugugcuu

SEQ ID NO: 1267 - DNA, 21 bp, Homo sapiens
gatgaggaactgtggaatgcc

SEQ ID NO: 1268 - RNA, 21 nt, RNAi-sense strand
ugaggaacuguggaaugccuu

SEQ ID NO: 1269 - RNA, 21 nt, RNAi-antisense strand
ggcauuccacaguuccucauu

SEQ ID NO: 1270 - DNA, 21 bp, Homo sapiens
gaggaactgtggaatgcctta

SEQ ID NO: 1271 - RNA, 21 nt, RNAi-sense strand
ggaacuguggaaugccuuauu

SEQ ID NO: 1272 - RNA, 21 nt, RNAi-antisense strand
uaaggcauuccacaguuccuu

SEQ ID NO: 1273 - DNA, 21 bp, Homo sapiens
gaactgtggaatgccttacaa

SEQ ID NO: 1274 - RNA, 21 nt, RNAi-sense strand
acuguggaaugccuuacaauu

SEQ ID NO: 1275 - RNA, 21 nt, RNAi-antisense strand
uuguaaggcauuccacaguuu

SEQ ID NO: 1276 - DNA, 21 bp, Homo sapiens
gaatgccttacaagaggtaca

SEQ ID NO: 1277 - RNA, 21 nt, RNAi-sense strand
augccuuacaagagguacauu

SEQ ID NO: 1278 - RNA, 21 nt, RNAi-antisense strand
uguaccucuuguaaggcauuu

SEQ ID NO: 1279 - DNA, 21 bp, Homo sapiens
gaggtacaacttaaagaaacc

SEQ ID NO: 1280 - RNA, 21 nt, RNAi-sense strand
gguacaacuuaaagaaaccuu

SEQ ID NO: 1281 - RNA, 21 nt, RNAi-antisense strand
gguuucuuuaaguuguaccuu

SEQ ID NO: 1282 - DNA, 21 bp, Homo sapiens
gaaaccattgaagatcttcct

SEQ ID NO: 1283 - RNA, 21 nt, RNAi-sense strand
aaccauugaagaucuuccuuu

SEQ ID NO: 1284 - RNA, 21 nt, RNAi-antisense strand
aggaagaucuucaaugguuuu

SEQ ID NO: 1285 - DNA, 21 bp, Homo sapiens
gatactgaattagcagaatca

SEQ ID NO: 1286 - RNA, 21 nt, RNAi-sense strand
uacugaauuagcagaaucauu

SEQ ID NO: 1287 - RNA, 21 nt, RNAi-antisense strand
ugauucugcuaauucaguauu

SEQ ID NO: 1288 - DNA, 21 bp, Homo sapiens
gaattagcagaatcaggatcc

SEQ ID NO: 1289 - RNA, 21 nt, RNAi-sense strand
auuagcagaaucaggauccuu

SEQ ID NO: 1290 - RNA, 21 nt, RNAi-antisense strand
ggauccugauucugcuaauuu

SEQ ID NO: 1291 - DNA, 21 bp, Homo sapiens
gacaaagacaactggtgtgcc

SEQ ID NO: 1292 - RNA, 21 nt, RNAi-sense strand
caaagacaacuggugugccuu

SEQ ID NO: 1293 - RNA, 21 nt, RNAi-antisense strand
ggcacaccaguugucuuuguu

SEQ ID NO: 1294 - DNA, 21 bp, Homo sapiens
gacaactggtgtgccttgcca

SEQ ID NO: 1295 - RNA, 21 nt, RNAi-sense strand
caacuggugugccuugccauu

SEQ ID NO: 1296 - RNA, 21 nt, RNAi-antisense strand
uggcaaggcacaccaguuguu

SEQ ID NO: 1297 - DNA, 21 bp, Homo sapiens
gattattgatgaagcgacggc

SEQ ID NO: 1298 - RNA, 21 nt, RNAi-sense strand
uuauugaugaagcgacggcuu

SEQ ID NO: 1299 - RNA, 21 nt, RNAi-antisense strand
gccgucgcuucaucaauaauu

SEQ ID NO: 1300 - DNA, 21 bp, Homo sapiens
gatgaagcgacggcaaatgtg

SEQ ID NO: 1301 - RNA, 21 nt, RNAi-sense strand
ugaagcgacggcaaauguguu

SEQ ID NO: 1302 - RNA, 21 nt, RNAi-antisense strand
cacauuugccgucgcuucauu

SEQ ID NO: 1303 - DNA, 21 bp, Homo sapiens
gaagcgacggcaaatgtggat

SEQ ID NO: 1304 - RNA, 21 nt, RNAi-sense strand
agcgacggcaaauguggauuu

SEQ ID NO: 1305 - RNA, 21 nt, RNAi-antisense strand
auccacauuugccgucgcuuu

SEQ ID NO: 1306 - DNA, 21 bp, Homo sapiens
gacggcaaatgtggatccaag

SEQ ID NO: 1307 - RNA, 21 nt, RNAi-sense strand
cggcaaauguggauccaaguu

SEQ ID NO: 1308 - RNA, 21 nt, RNAi-antisense strand
cuuggauccacauuugccguu

SEQ ID NO: 1309 - DNA, 21 bp, Homo sapiens
gatccaagaactgatgagtta

SEQ ID NO: 1310 - RNA, 21 nt, RNAi-sense strand
uccaagaacugaugaguuauu

SEQ ID NO: 1311 - RNA, 21 nt, RNAi-antisense strand
uaacucaucaguucuuggauu

SEQ ID NO: 1312 - DNA, 21 bp, Homo sapiens
gattgaacaccattattgaca

SEQ ID NO: 1313 - RNA, 21 nt, RNAi-sense strand
uugaacaccauuauugacauu

SEQ ID NO: 1314 - RNA, 21 nt, RNAi-antisense strand
ugucaauaaugguguucaauu

SEQ ID NO: 1315 - DNA, 21 bp, Homo sapiens
gaacaccattattgacagcga

SEQ ID NO: 1316 - RNA, 21 nt, RNAi-sense strand
acaccauuauugacagcgauu

SEQ ID NO: 1317 - RNA, 21 nt, RNAi-antisense strand
ucgcugucaauaaugguguuu

SEQ ID NO: 1318 - DNA, 21 bp, Homo sapiens
gacagcgacaagataatggtt

SEQ ID NO: 1319 - RNA, 21 nt, RNAi-sense strand
cagcgacaagauaaugguuuu

SEQ ID NO: 1320 - RNA, 21 nt, RNAi-antisense strand
aaccauuaucuugucgcuguu

SEQ ID NO: 1321 - DNA, 21 bp, Homo sapiens
gattcaggaagactgaaagaa

SEQ ID NO: 1322 - RNA, 21 nt, RNAi-sense strand
uucaggaagacugaaagaauu

SEQ ID NO: 1323 - RNA, 21 nt, RNAi-antisense strand
uucuuucagucuuccugaauu

SEQ ID NO: 1324 - DNA, 21 bp, Homo sapiens
gaagactgaaagaatatgatg

SEQ ID NO: 1325 - RNA, 21 nt, RNAi-sense strand
agacugaaagaauaugauguu

SEQ ID NO: 1326 - RNA, 21 nt, RNAi-antisense strand
caucauauucuuucagucuuu

SEQ ID NO: 1327 - DNA, 21 bp, Homo sapiens
gactgaaagaatatgatgagc

SEQ ID NO: 1328 - RNA, 21 nt, RNAi-sense strand
cugaaagaauaugaugagcuu

SEQ ID NO: 1329 - RNA, 21 nt, RNAi-antisense strand
gcucaucauauucuuucaguu

SEQ ID NO: 1330 - DNA, 21 bp, Homo sapiens
gaaagaatatgatgagccgta

SEQ ID NO: 1331 - RNA, 21 nt, RNAi-sense strand
aagaauaugaugagccguauu

SEQ ID NO: 1332 - RNA, 21 nt, RNAi-antisense strand
uacggcucaucauauucuuuu

SEQ ID NO: 1333 - DNA, 21 bp, Homo sapiens
gaatatgatgagccgtatgtt

SEQ ID NO: 1334 - RNA, 21 nt, RNAi-sense strand
auaugaugagccguauguuuu

SEQ ID NO: 1335 - RNA, 21 nt, RNAi-antisense strand
aacauacggcucaucauauuu

SEQ ID NO: 1336 - DNA, 21 bp, Homo sapiens
gaaattatccacatattggtc

SEQ ID NO: 1337 - RNA, 21 nt, RNAi-sense strand
aauuauccacauauuggucuu

SEQ ID NO: 1338 - RNA, 21 nt, RNAi-antisense strand
gaccaauauguggauaauuuu

SEQ ID NO: 1339 - DNA, 21 bp, Homo sapiens
gaccacatggttacaaacact

SEQ ID NO: 1340 - RNA, 21 nt, RNAi-sense strand
ccacaugguuacaaacacuuu

SEQ ID NO: 1341 - RNA, 21 nt, RNAi-antisense strand
aguguuuguaaccaugugguu

SEQ ID NO: 1342 - DNA, 21 bp, Homo sapiens
gagacagcactgtgaatccaa

SEQ ID NO: 1343 - RNA, 21 nt, RNAi-sense strand
gacagcacugugaauccaauu

SEQ ID NO: 1344 - RNA, 21 nt, RNAi-antisense strand
uuggauucacagugcugucuu

SEQ ID NO: 1345 - DNA, 21 bp, Homo sapiens
gacagcactgtgaatccaacc

SEQ ID NO: 1346 - RNA, 21 nt, RNAi-sense strand
cagcacugugaauccaaccuu

SEQ ID NO: 1347 - RNA, 21 nt, RNAi-antisense strand
gguuggauucacagugcuguu

SEQ ID NO: 1348 - DNA, 21 bp, Homo sapiens
gactatgtaaaccacattgta

SEQ ID NO: 1349 - RNA, 21 nt, RNAi-sense strand
cuauguaaaccacauuguauu

SEQ ID NO: 1350 - RNA, 21 nt, RNAi-antisense strand
uacaaugugguuuacauaguu

SEQ ID NO: 1351 - DNA, 21 bp, Homo sapiens
taaacggagattagaggaaga

SEQ ID NO: 1352 - RNA, 21 nt, RNAi-sense strand
aacggagauuagaggaagauu

SEQ ID NO: 1353 - RNA, 21 nt, RNAi-antisense strand
ucuuccucuaaucuccguuuu

SEQ ID NO: 1354 - DNA, 21 bp, Homo sapiens
tatgtattcagtgctgccaga

SEQ ID NO: 1355 - RNA, 21 nt, RNAi-sense strand
uguauucagugcugccagauu

SEQ ID NO: 1356 - RNA, 21 nt, RNAi-antisense strand
ucuggcagcacugaauacauu

SEQ ID NO: 1357 - DNA, 21 bp, Homo sapiens
tattcagtgctgccagaagac

SEQ ID NO: 1358 - RNA, 21 nt, RNAi-sense strand
uucagugcugccagaagacuu

SEQ ID NO: 1359 - RNA, 21 nt, RNAi-antisense strand
gucuucuggcagcacugaauu

SEQ ID NO: 1360 - DNA, 21 bp, Homo sapiens
taagagctgagaatgacgcac

SEQ ID NO: 1361 - RNA, 21 nt, RNAi-sense strand
agagcugagaaugacgcacuu

SEQ ID NO: 1362 - RNA, 21 nt, RNAi-antisense strand
gugcgucauucucagcucuuu

SEQ ID NO: 1363 - DNA, 21 bp, Homo sapiens
tacgttaattgaggaaagtgc

SEQ ID NO: 1364 - RNA, 21 nt, RNAi-sense strand
cguuaauugaggaaagugcuu

SEQ ID NO: 1365 - RNA, 21 nt, RNAi-antisense strand
gcacuuuccucaauuaacguu

SEQ ID NO: 1366 - DNA, 21 bp, Homo sapiens
taattgaggaaagtgccaaag

SEQ ID NO: 1367 - RNA, 21 nt, RNAi-sense strand
auugaggaaagugccaaaguu

SEQ ID NO: 1368 - RNA, 21 nt, RNAi-antisense strand
cuuuggcacuuuccucaauuu

SEQ ID NO: 1369 - DNA, 21 bp, Homo sapiens
tacgcctatgccacggtgctg

SEQ ID NO: 1370 - RNA, 21 nt, RNAi-sense strand
cgccuaugccacggugcuguu

SEQ ID NO: 1371 - RNA, 21 nt, RNAi-antisense strand
cagcaccguggcauaggcguu

SEQ ID NO: 1372 - DNA, 21 bp, Homo sapiens
tacgagtagccatgtgccata

SEQ ID NO: 1373 - RNA, 21 nt, RNAi-sense strand
cgaguagccaugugccauauu

SEQ ID NO: 1374 - RNA, 21 nt, RNAi-antisense strand
uauggcacauggcuacucguu

SEQ ID NO: 1375 - DNA, 21 bp, Homo sapiens
tagccatgtgccatatgattt

SEQ ID NO: 1376 - RNA, 21 nt, RNAi-sense strand
gccaugugccauaugauuuuu

SEQ ID NO: 1377 - RNA, 21 nt, RNAi-antisense strand
aaaucauauggcacauggcuu

SEQ ID NO: 1378 - DNA, 21 bp, Homo sapiens
tatgatttatcggaaggcact

SEQ ID NO: 1379 - RNA, 21 nt, RNAi-sense strand
ugauuuaucggaaggcacuuu

SEQ ID NO: 1380 - RNA, 21 nt, RNAi-antisense strand
agugccuuccgauaaaucauu

SEQ ID NO: 1381 - DNA, 21 bp, Homo sapiens
tatcggaaggcacttcgtctt

SEQ ID NO: 1382 - RNA, 21 nt, RNAi-sense strand
ucggaaggcacuucgucuuuu

SEQ ID NO: 1383 - RNA, 21 nt, RNAi-antisense strand
aagacgaagugccuuccgauu

SEQ ID NO: 1384 - DNA, 21 bp, Homo sapiens
tagtcaatctgctgtccaatg

SEQ ID NO: 1385 - RNA, 21 nt, RNAi-sense strand
gucaaucugcuguccaauguu

SEQ ID NO: 1386 - RNA, 21 nt, RNAi-antisense strand
cauuggacagcagauugacuu

SEQ ID NO: 1387 - DNA, 21 bp, Homo sapiens
tactctggatggagataggaa

SEQ ID NO: 1388 - RNA, 21 nt, RNAi-sense strand
cucuggauggagauaggaauu

SEQ ID NO: 1389 - RNA, 21 nt, RNAi-antisense strand
uuccuaucuccauccagaguu

SEQ ID NO: 1390 - DNA, 21 bp, Homo sapiens
taggaatatcgtgccttgctg

SEQ ID NO: 1391 - RNA, 21 nt, RNAi-sense strand
ggaauaucgugccuugcuguu

SEQ ID NO: 1392 - RNA, 21 nt, RNAi-antisense strand
cagcaaggcacgauauuccuu

SEQ ID NO: 1393 - DNA, 21 bp, Homo sapiens
taccaatttgagaaagaagga

SEQ ID NO: 1394 - RNA, 21 nt, RNAi-sense strand
ccaauuugagaaagaaggauu

SEQ ID NO: 1395 - RNA, 21 nt, RNAi-antisense strand
uccuucuuucucaaauugguu

SEQ ID NO: 1396 - DNA, 21 bp, Homo sapiens
tacgtgctcctcggcagtgtg

SEQ ID NO: 1397 - RNA, 21 nt, RNAi-sense strand
cgugcuccucggcaguguguu

SEQ ID NO: 1398 - RNA, 21 nt, RNAi-antisense strand
cacacugccgaggagcacguu

SEQ ID NO: 1399 - DNA, 21 bp, Homo sapiens
tacttgatgagatatcacagc

SEQ ID NO: 1400 - RNA, 21 nt, RNAi-sense strand
cuugaugagauaucacagcuu

SEQ ID NO: 1401 - RNA, 21 nt, RNAi-antisense strand
gcugugauaucucaucaaguu

SEQ ID NO: 1402 - DNA, 21 bp, Homo sapiens
tatcacagcgcaaccgtcagc

SEQ ID NO: 1403 - RNA, 21 nt, RNAi-sense strand
ucacagcgcaaccgucagcuu

SEQ ID NO: 1404 - RNA, 21 nt, RNAi-antisense strand
gcugacgguugcgcugugauu

SEQ ID NO: 1405 - DNA, 21 bp, Homo sapiens
tacaaggcctttcctttactg

SEQ ID NO: 1406 - RNA, 21 nt, RNAi-sense strand
caaggccuuuccuuuacuguu

SEQ ID NO: 1407 - RNA, 21 nt, RNAi-antisense strand
caguaaaggaaaggccuuguu

SEQ ID NO: 1408 - DNA, 21 bp, Homo sapiens
tactgtcagacctggcgaatt

SEQ ID NO: 1409 - RNA, 21 nt, RNAi-sense strand
cugucagaccuggcgaauuuu

SEQ ID NO: 1410 - RNA, 21 nt, RNAi-antisense strand
aauucgccaggucugacaguu

SEQ ID NO: 1411 - DNA, 21 bp, Homo sapiens
tacagctgttggaggatggtg

SEQ ID NO: 1412 - RNA, 21 nt, RNAi-sense strand
cagcuguuggaggaugguguu

SEQ ID NO: 1413 - RNA, 21 nt, RNAi-antisense strand
caccauccuccaacagcuguu

SEQ ID NO: 1414 - DNA, 21 bp, Homo sapiens
taaaccttgcaagagcagtgt

SEQ ID NO: 1415 - RNA, 21 nt, RNAi-sense strand
aaccuugcaagagcaguguuu

SEQ ID NO: 1416 - RNA, 21 nt, RNAi-antisense strand
acacugcucuugcaagguuuu

SEQ ID NO: 1417 - DNA, 21 bp, Homo sapiens
tatcaagatgctgacatctat

SEQ ID NO: 1418 - RNA, 21 nt, RNAi-sense strand
ucaagaugcugacaucuauuu

SEQ ID NO: 1419 - RNA, 21 nt, RNAi-antisense strand
auagaugucagcaucuugauu

SEQ ID NO: 1420 - DNA, 21 bp, Homo sapiens
tatctcctggacgatcctctc

SEQ ID NO: 1421 - RNA, 21 nt, RNAi-sense strand
ucuccuggacgauccucucuu

SEQ ID NO: 1422 - RNA, 21 nt, RNAi-antisense strand
gagaggaucguccaggagauu

SEQ ID NO: 1423 - DNA, 21 bp, Homo sapiens
tagatgcggaagttagcagac

SEQ ID NO: 1424 - RNA, 21 nt, RNAi-sense strand
gaugcggaaguuagcagacuu

SEQ ID NO: 1425 - RNA, 21 nt, RNAi-antisense strand
gucugcuaacuuccgcaucuu

SEQ ID NO: 1426 - DNA, 21 bp, Homo sapiens
tagcagacacttgttcgaact

SEQ ID NO: 1427 - RNA, 21 nt, RNAi-sense strand
gcagacacuuguucgaacuuu

SEQ ID NO: 1428 - RNA, 21 nt, RNAi-antisense strand
aguucgaacaagugucugcuu

SEQ ID NO: 1429 - DNA, 21 bp, Homo sapiens
tagtgactcatcagttgcagt

SEQ ID NO: 1430 - RNA, 21 nt, RNAi-sense strand
gugacucaucaguugcaguuu

SEQ ID NO: 1431 - RNA, 21 nt, RNAi-antisense strand
acugcaacugaugagucacuu

SEQ ID NO: 1432 - DNA, 21 bp, Homo sapiens
tacctcaaagctgcaagtcag

SEQ ID NO: 1433 - RNA, 21 nt, RNAi-sense strand
ccucaaagcugcaagucaguu

SEQ ID NO: 1434 - RNA, 21 nt, RNAi-antisense strand
cugacuugcagcuuugagguu

SEQ ID NO: 1435 - DNA, 21 bp, Homo sapiens
taatgaggaaagtgaacaacc

SEQ ID NO: 1436 - RNA, 21 nt, RNAi-sense strand
augaggaaagugaacaaccuu

SEQ ID NO: 1437 - RNA, 21 nt, RNAi-antisense strand
gguuguucacuuuccucauuu

SEQ ID NO: 1438 - DNA, 21 bp, Homo sapiens
taaggaatcgtaccttctcag

SEQ ID NO: 1439 - RNA, 21 nt, RNAi-sense strand
aggaaucguaccuucucaguu

SEQ ID NO: 1440 - RNA, 21 nt, RNAi-antisense strand
cugagaagguacgauuccuuu

SEQ ID NO: 1441 - DNA, 21 bp, Homo sapiens
taccttctcagagtcttcggt

SEQ ID NO: 1442 - RNA, 21 nt, RNAi-sense strand
ccuucucagagucuucgguuu

SEQ ID NO: 1443 - RNA, 21 nt, RNAi-antisense strand
accgaagacucugagaagguu

SEQ ID NO: 1444 - DNA, 21 bp, Homo sapiens
tacactatcagaggagaaccg

SEQ ID NO: 1445 - RNA, 21 nt, RNAi-sense strand
cacuaucagaggagaaccguu

SEQ ID NO: 1446 - RNA, 21 nt, RNAi-antisense strand
cgguucuccucugauaguguu

SEQ ID NO: 1447 - DNA, 21 bp, Homo sapiens
tatcagaggagaaccgttctg

SEQ ID NO: 1448 - RNA, 21 nt, RNAi-sense strand
ucagaggagaaccguucuguu

SEQ ID NO: 1449 - RNA, 21 nt, RNAi-antisense strand
cagaacgguucuccucugauu

SEQ ID NO: 1450 - DNA, 21 bp, Homo sapiens
taagaattacttcagagctgg

SEQ ID NO: 1451 - RNA, 21 nt, RNAi-sense strand
agaauuacuucagagcugguu

SEQ ID NO: 1452 - RNA, 21 nt, RNAi-antisense strand
ccagcucugaaguaauucuuu

SEQ ID NO: 1453 - DNA, 21 bp, Homo sapiens
tacttcagagctggtgctcac

SEQ ID NO: 1454 - RNA, 21 nt, RNAi-sense strand
cuucagagcuggugcucacuu

SEQ ID NO: 1455 - RNA, 21 nt, RNAi-antisense strand
gugagcaccagcucugaaguu

SEQ ID NO: 1456 - DNA, 21 bp, Homo sapiens
tattctcctaaacactgcagc

SEQ ID NO: 1457 - RNA, 21 nt, RNAi-sense strand
uucuccuaaacacugcagcuu

SEQ ID NO: 1458 - RNA, 21 nt, RNAi-antisense strand
gcugcaguguuuaggagaauu

SEQ ID NO: 1459 - DNA, 21 bp, Homo sapiens
taaacactgcagctcaggttg

SEQ ID NO: 1460 - RNA, 21 nt, RNAi-sense strand
aacacugcagcucagguuguu

SEQ ID NO: 1461 - RNA, 21 nt, RNAi-antisense strand
caaccugagcugcaguguuuu

SEQ ID NO: 1462 - DNA, 21 bp, Homo sapiens
tatgtgcttcaagattggtgg

SEQ ID NO: 1463 - RNA, 21 nt, RNAi-sense strand
ugugcuucaagauuggugguu

SEQ ID NO: 1464 - RNA, 21 nt, RNAi-antisense strand
ccaccaaucuugaagcacauu

SEQ ID NO: 1465 - DNA, 21 bp, Homo sapiens
taaatgtcactgtaaatggag

SEQ ID NO: 1466 - RNA, 21 nt, RNAi-sense strand
aaugucacuguaaauggaguu

SEQ ID NO: 1467 - RNA, 21 nt, RNAi-antisense strand
cuccauuuacagugacauuuu

SEQ ID NO: 1468 - DNA, 21 bp, Homo sapiens
taaatggaggaggaaatgtaa

SEQ ID NO: 1469 - RNA, 21 nt, RNAi-sense strand
aauggaggaggaaauguaauu

SEQ ID NO: 1470 - RNA, 21 nt, RNAi-antisense strand
uuacauuuccuccuccauuuu

SEQ ID NO: 1471 - DNA, 21 bp, Homo sapiens
taaccgagaagctagatctta

SEQ ID NO: 1472 - RNA, 21 nt, RNAi-sense strand
accgagaagcuagaucuuauu

SEQ ID NO: 1473 - RNA, 21 nt, RNAi-antisense strand
uaagaucuagcuucucgguuu

SEQ ID NO: 1474 - DNA, 21 bp, Homo sapiens
tagatcttaactggtacttag

SEQ ID NO: 1475 - RNA, 21 nt, RNAi-sense strand
gaucuuaacugguacuuaguu

SEQ ID NO: 1476 - RNA, 21 nt, RNAi-antisense strand
cuaaguaccaguuaagaucuu

SEQ ID NO: 1477 - DNA, 21 bp, Homo sapiens
tattcaggtttaactgtagct

SEQ ID NO: 1478 - RNA, 21 nt, RNAi-sense strand
uucagguuuaacuguagcuuu

SEQ ID NO: 1479 - RNA, 21 nt, RNAi-antisense strand
agcuacaguuaaaccugaauu

SEQ ID NO: 1480 - DNA, 21 bp, Homo sapiens
taactgtagctaccgttcttt

SEQ ID NO: 1481 - RNA, 21 nt, RNAi-sense strand
acuguagcuaccguucuuuuu

SEQ ID NO: 1482 - RNA, 21 nt, RNAi-antisense strand
aaagaacgguagcuacaguuu

SEQ ID NO: 1483 - DNA, 21 bp, Homo sapiens
tagcaagatctctattggtat

SEQ ID NO: 1484 - RNA, 21 nt, RNAi-sense strand
gcaagaucucuauugguauuu

SEQ ID NO: 1485 - RNA, 21 nt, RNAi-antisense strand
auaccaauagagaucuugcuu

SEQ ID NO: 1486 - DNA, 21 bp, Homo sapiens
tattggtattctacgtccttg

SEQ ID NO: 1487 - RNA, 21 nt, RNAi-sense strand
uugguauucuacguccuuguu

SEQ ID NO: 1488 - RNA, 21 nt, RNAi-antisense strand
caaggacguagaauaccaauu

SEQ ID NO: 1489 - DNA, 21 bp, Homo sapiens
tattctacgtccttgttaact

SEQ ID NO: 1490 - RNA, 21 nt, RNAi-sense strand
uucuacguccuuguuaacuuu

SEQ ID NO: 1491 - RNA, 21 nt, RNAi-antisense strand
aguuaacaaggacguagaauu

SEQ ID NO: 1492 - DNA, 21 bp, Homo sapiens
tacgtccttgttaactcttca

SEQ ID NO: 1493 - RNA, 21 nt, RNAi-sense strand
cguccuuguuaacucuucauu

SEQ ID NO: 1494 - RNA, 21 nt, RNAi-antisense strand
ugaagaguuaacaaggacguu

SEQ ID NO: 1495 - DNA, 21 bp, Homo sapiens
taactcttcacaaactttgca

SEQ ID NO: 1496 - RNA, 21 nt, RNAi-sense strand
acucuucacaaacuuugcauu

SEQ ID NO: 1497 - RNA, 21 nt, RNAi-antisense strand
ugcaaaguuugugaagaguuu

SEQ ID NO: 1498 - DNA, 21 bp, Homo sapiens
taaatcgtttctccaaagaca

SEQ ID NO: 1499 - RNA, 21 nt, RNAi-sense strand
aaucguuucuccaaagacauu

SEQ ID NO: 1500 - RNA, 21 nt, RNAi-antisense strand
ugucuuuggagaaacgauuuu

SEQ ID NO: 1501 - DNA, 21 bp, Homo sapiens
tagatttcatccagacattgc

SEQ ID NO: 1502 - RNA, 21 nt, RNAi-sense strand
gauuucauccagacauugcuu

SEQ ID NO: 1503 - RNA, 21 nt, RNAi-antisense strand
gcaaugucuggaugaaaucuu

SEQ ID NO: 1504 - DNA, 21 bp, Homo sapiens
tacaagtggttggtgtggtct

SEQ ID NO: 1505 - RNA, 21 nt, RNAi-sense strand
caagugguugguguggucuuu

SEQ ID NO: 1506 - RNA, 21 nt, RNAi-antisense strand
agaccacaccaaccacuuguu

SEQ ID NO: 1507 - DNA, 21 bp, Homo sapiens
tacaactcggagtccagtgtt

SEQ ID NO: 1508 - RNA, 21 nt, RNAi-sense strand
caacucggaguccaguguuuu

SEQ ID NO: 1509 - RNA, 21 nt, RNAi-antisense strand
aacacuggacuccgaguuguu

SEQ ID NO: 1510 - DNA, 21 bp, Homo sapiens
tacaaagcagaagagaggtgt

SEQ ID NO: 1511 - RNA, 21 nt, RNAi-sense strand
caaagcagaagagagguguuu

SEQ ID NO: 1512 - RNA, 21 nt, RNAi-antisense strand
acaccucucuucugcuuuguu

SEQ ID NO: 1513 - DNA, 21 bp, Homo sapiens
tacattcagaggcttggttct

SEQ ID NO: 1514 - RNA, 21 nt, RNAi-sense strand
cauucagaggcuugguucuuu

SEQ ID NO: 1515 - RNA, 21 nt, RNAi-antisense strand
agaaccaagccucugaauguu

SEQ ID NO: 1516 - DNA, 21 bp, Homo sapiens
tatgatgatctcagtagaaag

SEQ ID NO: 1517 - RNA, 21 nt, RNAi-sense strand
ugaugaucucaguagaaaguu

SEQ ID NO: 1518 - RNA, 21 nt, RNAi-antisense strand
cuuucuacugagaucaucauu

SEQ ID NO: 1519 - DNA, 21 bp, Homo sapiens
tactgaagcatctgacagcac

SEQ ID NO: 1520 - RNA, 21 nt, RNAi-sense strand
cugaagcaucugacagcacuu

SEQ ID NO: 1521 - RNA, 21 nt, RNAi-antisense strand
gugcugucagaugcuucaguu

SEQ ID NO: 1522 - DNA, 21 bp, Homo sapiens
taaggagcacacggatgagga

SEQ ID NO: 1523 - RNA, 21 nt, RNAi-sense strand
aggagcacacggaugaggauu

SEQ ID NO: 1524 - RNA, 21 nt, RNAi-antisense strand
uccucauccgugugcuccuuu

SEQ ID NO: 1525 - DNA, 21 bp, Homo sapiens
tacaagaggtacaacttaaag

SEQ ID NO: 1526 - RNA, 21 nt, RNAi-sense strand
caagagguacaacuuaaaguu

SEQ ID NO: 1527 - RNA, 21 nt, RNAi-antisense strand
cuuuaaguuguaccucuuguu

SEQ ID NO: 1528 - DNA, 21 bp, Homo sapiens
tactgaattagcagaatcagg

SEQ ID NO: 1529 - RNA, 21 nt, RNAi-sense strand
cugaauuagcagaaucagguu

SEQ ID NO: 1530 - RNA, 21 nt, RNAi-antisense strand
ccugauucugcuaauucaguu

SEQ ID NO: 1531 - DNA, 21 bp, Homo sapiens
tagcagaatcaggatccaatt

SEQ ID NO: 1532 - RNA, 21 nt, RNAi-sense strand
gcagaaucaggauccaauuuu

SEQ ID NO: 1533 - RNA, 21 nt, RNAi-antisense strand
aauuggauccugauucugcuu

SEQ ID NO: 1534 - DNA, 21 bp, Homo sapiens
tagtgttggacaaagacaact

SEQ ID NO: 1535 - RNA, 21 nt, RNAi-sense strand
guguuggacaaagacaacuuu

SEQ ID NO: 1536 - RNA, 21 nt, RNAi-antisense strand
aguugucuuuguccaacacuu

SEQ ID NO: 1537 - DNA, 21 bp, Homo sapiens
tattgatgaagcgacggcaaa

SEQ ID NO: 1538 - RNA, 21 nt, RNAi-sense strand
uugaugaagcgacggcaaauu

SEQ ID NO: 1539 - RNA, 21 nt, RNAi-antisense strand
uuugccgucgcuucaucaauu

SEQ ID NO: 1540 - DNA, 21 bp, Homo sapiens
taaccattgcacacagattga

SEQ ID NO: 1541 - RNA, 21 nt, RNAi-sense strand
accauugcacacagauugauu

SEQ ID NO: 1542 - RNA, 21 nt, RNAi-antisense strand
ucaaucugugugcaaugguuu

SEQ ID NO: 1543 - DNA, 21 bp, Homo sapiens
tattgacagcgacaagataat

SEQ ID NO: 1544 - RNA, 21 nt, RNAi-sense strand
uugacagcgacaagauaauuu

SEQ ID NO: 1545 - RNA, 21 nt, RNAi-antisense strand
auuaucuugucgcugucaauu

SEQ ID NO: 1546 - DNA, 21 bp, Homo sapiens
tagattcaggaagactgaaag

SEQ ID NO: 1547 - RNA, 21 nt, RNAi-sense strand
gauucaggaagacugaaaguu

SEQ ID NO: 1548 - RNA, 21 nt, RNAi-antisense strand
cuuucagucuuccugaaucuu

SEQ ID NO: 1549 - DNA, 21 bp, Homo sapiens
tacaagatggtgcaacaactg

SEQ ID NO: 1550 - RNA, 21 nt, RNAi-sense strand
caagauggugcaacaacuguu

SEQ ID NO: 1551 - RNA, 21 nt, RNAi-antisense strand
caguuguugcaccaucuuguu

SEQ ID NO: 1552 - DNA, 21 bp, Homo sapiens
tatccacatattggtcacact

SEQ ID NO: 1553 - RNA, 21 nt, RNAi-sense strand
uccacauauuggucacacuuu

SEQ ID NO: 1554 - RNA, 21 nt, RNAi-antisense strand
agugugaccaauauguggauu

SEQ ID NO: 1555 - DNA, 21 bp, Homo sapiens
tattggtcacactgaccacat

SEQ ID NO: 1556 - RNA, 21 nt, RNAi-sense strand
uuggucacacugaccacauuu

SEQ ID NO: 1557 - RNA, 21 nt, RNAi-antisense strand
auguggucagugugaccaauu

SEQ ID NO: 1558 - DNA, 21 bp, Homo sapiens
tacaaacacttccaatggaca

SEQ ID NO: 1559 - RNA, 21 nt, RNAi-sense strand
caaacacuuccaauggacauu

SEQ ID NO: 1560 - RNA, 21 nt, RNAi-antisense strand
uguccauuggaaguguuuguu

SEQ ID NO: 1561 - DNA, 21 bp, Homo sapiens
tacatacaagatgctagttca

SEQ ID NO: 1562 - RNA, 21 nt, RNAi-sense strand
cauacaagaugcuaguucauu

SEQ ID NO: 1563 - RNA, 21 nt, RNAi-antisense strand
ugaacuagcaucuuguauguu

SEQ ID NO: 1564 - DNA, 21 bp, Homo sapiens
tacaagatgctagttcatttg

SEQ ID NO: 1565 - RNA, 21 nt, RNAi-sense strand
caagaugcuaguucauuuguu

SEQ ID NO: 1566 - RNA, 21 nt, RNAi-antisense strand
caaaugaacuagcaucuuguu

SEQ ID NO: 1567 - DNA, 21 bp, Homo sapiens
aagatgatatgtattcagtgc

SEQ ID NO: 1568 - RNA, 21 nt, RNAi-sense strand
gaugauauguauucagugcuu

SEQ ID NO: 1569 - RNA, 21 nt, RNAi-antisense strand
gcacugaauacauaucaucuu

SEQ ID NO: 1570 - DNA, 21 bp, Homo sapiens
aagagctgagaatgacgcaca

SEQ ID NO: 1571 - RNA, 21 nt, RNAi-sense strand
gagcugagaaugacgcacauu

SEQ ID NO: 1572 - RNA, 21 nt, RNAi-antisense strand
ugugcgucauucucagcucuu

SEQ ID NO: 1573 - DNA, 21 bp, Homo sapiens
aaagtgccaaagtaatccagc

SEQ ID NO: 1574 - RNA, 21 nt, RNAi-sense strand
agugccaaaguaauccagcuu

SEQ ID NO: 1575 - RNA, 21 nt, RNAi-antisense strand
gcuggauuacuuuggcacuuu

SEQ ID NO: 1576 - DNA, 21 bp, Homo sapiens
aagtgccaaagtaatccagcc

SEQ ID NO: 1577 - RNA, 21 nt, RNAi-sense strand
gugccaaaguaauccagccuu

SEQ ID NO: 1578 - RNA, 21 nt, RNAi-antisense strand
ggcuggauuacuuuggcacuu

SEQ ID NO: 1579 - DNA, 21 bp, Homo sapiens
aaggcacttcgtcttagtaac

SEQ ID NO: 1580 - RNA, 21 nt, RNAi-sense strand
ggcacuucgucuuaguaacuu

SEQ ID NO: 1581 - RNA, 21 nt, RNAi-antisense strand
guuacuaagacgaagugccuu

SEQ ID NO: 1582 - DNA, 21 bp, Homo sapiens
aaccacaggccagatagtcaa

SEQ ID NO: 1583 - RNA, 21 nt, RNAi-sense strand
ccacaggccagauagucaauu

SEQ ID NO: 1584 - RNA, 21 nt, RNAi-antisense strand
uugacuaucuggccugugguu

SEQ ID NO: 1585 - DNA, 21 bp, Homo sapiens
aacaagtttgatcaggtgaca

SEQ ID NO: 1586 - RNA, 21 nt, RNAi-sense strand
caaguuugaucaggugacauu

SEQ ID NO: 1587 - RNA, 21 nt, RNAi-antisense strand
ugucaccugaucaaacuuguu

SEQ ID NO: 1588 - DNA, 21 bp, Homo sapiens
aaactgcaactttcacggatg

SEQ ID NO: 1589 - RNA, 21 nt, RNAi-sense strand
acugcaacuuucacggauguu

SEQ ID NO: 1590 - RNA, 21 nt, RNAi-antisense strand
cauccgugaaaguugcaguuu

SEQ ID NO: 1591 - DNA, 21 bp, Homo sapiens
aactgcaactttcacggatgc

SEQ ID NO: 1592 - RNA, 21 nt, RNAi-sense strand
cugcaacuuucacggaugcuu

SEQ ID NO: 1593 - RNA, 21 nt, RNAi-antisense strand
gcauccgugaaaguugcaguu

SEQ ID NO: 1594 - DNA, 21 bp, Homo sapiens
aaatcatcgtgtttgtgacct

SEQ ID NO: 1595 - RNA, 21 nt, RNAi-sense strand
aucaucguguuugugaccuuu

SEQ ID NO: 1596 - RNA, 21 nt, RNAi-antisense strand
aggucacaaacacgaugauuu

SEQ ID NO: 1597 - DNA, 21 bp, Homo sapiens
aatcatcgtgtttgtgacctt

SEQ ID NO: 1598 - RNA, 21 nt, RNAi-sense strand
ucaucguguuugugaccuuuu

SEQ ID NO: 1599 - RNA, 21 nt, RNAi-antisense strand
aaggucacaaacacgaugauu

SEQ ID NO: 1600 - DNA, 21 bp, Homo sapiens
aaagatggtgcatgtgcagga

SEQ ID NO: 1601 - RNA, 21 nt, RNAi-sense strand
agauggugcaugugcaggauu

SEQ ID NO: 1602 - RNA, 21 nt, RNAi-antisense strand
uccugcacaugcaccaucuuu

SEQ ID NO: 1603 - DNA, 21 bp, Homo sapiens
aagatggtgcatgtgcaggat

SEQ ID NO: 1604 - RNA, 21 nt, RNAi-sense strand
gauggugcaugugcaggauuu

SEQ ID NO: 1605 - RNA, 21 nt, RNAi-antisense strand
auccugcacaugcaccaucuu

SEQ ID NO: 1606 - DNA, 21 bp, Homo sapiens
aaggcctttcctttactgtca

SEQ ID NO: 1607 - RNA, 21 nt, RNAi-sense strand
ggccuuuccuuuacugucauu

SEQ ID NO: 1608 - RNA, 21 nt, RNAi-antisense strand
ugacaguaaaggaaaggccuu

SEQ ID NO: 1609 - DNA, 21 bp, Homo sapiens
aaaggatttacagctgttgga

SEQ ID NO: 1610 - RNA, 21 nt, RNAi-sense strand
aggauuuacagcuguuggauu

SEQ ID NO: 1611 - RNA, 21 nt, RNAi-antisense strand
uccaacagcuguaaauccuuu

SEQ ID NO: 1612 - DNA, 21 bp, Homo sapiens
aaggatttacagctgttggag

SEQ ID NO: 1613 - RNA, 21 nt, RNAi-sense strand
ggauuuacagcuguuggaguu

SEQ ID NO: 1614 - RNA, 21 nt, RNAi-antisense strand
cuccaacagcuguaaauccuu

SEQ ID NO: 1615 - DNA, 21 bp, Homo sapiens
aaggaatcgtaccttctcaga

SEQ ID NO: 1616 - RNA, 21 nt, RNAi-sense strand
ggaaucguaccuucucagauu

SEQ ID NO: 1617 - RNA, 21 nt, RNAi-antisense strand
ucugagaagguacgauuccuu

SEQ ID NO: 1618 - DNA, 21 bp, Homo sapiens
aagtatgctaaatgtcactgt

SEQ ID NO: 1619 - RNA, 21 nt, RNAi-sense strand
guaugcuaaaugucacuguuu

SEQ ID NO: 1620 - RNA, 21 nt, RNAi-antisense strand
acagugacauuuagcauacuu

SEQ ID NO: 1621 - DNA, 21 bp, Homo sapiens
aaatgtaaccgagaagctaga

SEQ ID NO: 1622 - RNA, 21 nt, RNAi-sense strand
auguaaccgagaagcuagauu

SEQ ID NO: 1623 - RNA, 21 nt, RNAi-antisense strand
ucuagcuucucgguuacauuu

SEQ ID NO: 1624 - DNA, 21 bp, Homo sapiens
aatgtaaccgagaagctagat

SEQ ID NO: 1625 - RNA, 21 nt, RNAi-sense strand
uguaaccgagaagcuagauuu

SEQ ID NO: 1626 - RNA, 21 nt, RNAi-antisense strand
aucuagcuucucgguuacauu

SEQ ID NO: 1627 - DNA, 21 bp, Homo sapiens
aagctagatcttaactggtac

SEQ ID NO: 1628 - RNA, 21 nt, RNAi-sense strand
gcuagaucuuaacugguacuu

SEQ ID NO: 1629 - RNA, 21 nt, RNAi-antisense strand
guaccaguuaagaucuagcuu

SEQ ID NO: 1630 - DNA, 21 bp, Homo sapiens
aattctgaaagctccggtatt

SEQ ID NO: 1631 - RNA, 21 nt, RNAi-sense strand
uucugaaagcuccgguauuuu

SEQ ID NO: 1632 - RNA, 21 nt, RNAi-antisense strand
aauaccggagcuuucagaauu

SEQ ID NO: 1633 - DNA, 21 bp, Homo sapiens
aaacgtcaagagatgtgaagc

SEQ ID NO: 1634 - RNA, 21 nt, RNAi-sense strand
acgucaagagaugugaagcuu

SEQ ID NO: 1635 - RNA, 21 nt, RNAi-antisense strand
gcuucacaucucuugacguuu

SEQ ID NO: 1636 - DNA, 21 bp, Homo sapiens
aacgtcaagagatgtgaagcg

SEQ ID NO: 1637 - RNA, 21 nt, RNAi-sense strand
cgucaagagaugugaagcguu

SEQ ID NO: 1638 - RNA, 21 nt, RNAi-antisense strand
cgcuucacaucucuugacguu

SEQ ID NO: 1639 - DNA, 21 bp, Homo sapiens
aagcgcctggaatctacaact

SEQ ID NO: 1640 - RNA, 21 nt, RNAi-sense strand
gcgccuggaaucuacaacuuu

SEQ ID NO: 1641 - RNA, 21 nt, RNAi-antisense strand
aguuguagauuccaggcgcuu

SEQ ID NO: 1642 - DNA, 21 bp, Homo sapiens
aatctacaactcggagtccag

SEQ ID NO: 1643 - RNA, 21 nt, RNAi-sense strand
ucuacaacucggaguccaguu

SEQ ID NO: 1644 - RNA, 21 nt, RNAi-antisense strand
cuggacuccgaguuguagauu

SEQ ID NO: 1645 - DNA, 21 bp, Homo sapiens
aactgaaattggacttcacga

SEQ ID NO: 1646 - RNA, 21 nt, RNAi-sense strand
cugaaauuggacuucacgauu

SEQ ID NO: 1647 - RNA, 21 nt, RNAi-antisense strand
ucgugaaguccaauuucaguu

SEQ ID NO: 1648 - DNA, 21 bp, Homo sapiens
aatcatacctcaggaacctgt

SEQ ID NO: 1649 - RNA, 21 nt, RNAi-sense strand
ucauaccucaggaaccuguuu

SEQ ID NO: 1650 - RNA, 21 nt, RNAi-antisense strand
acagguuccugagguaugauu

SEQ ID NO: 1651 - DNA, 21 bp, Homo sapiens
aaagacaactggtgtgccttg

SEQ ID NO: 1652 - RNA, 21 nt, RNAi-sense strand
agacaacuggugugccuuguu

SEQ ID NO: 1653 - RNA, 21 nt, RNAi-antisense strand
caaggcacaccaguugucuuu

SEQ ID NO: 1654 - DNA, 21 bp, Homo sapiens
aacaccattattgacagcgac

SEQ ID NO: 1655 - RNA, 21 nt, RNAi-sense strand
caccauuauugacagcgacuu

SEQ ID NO: 1656 - RNA, 21 nt, RNAi-antisense strand
gucgcugucaauaaugguguu

SEQ ID NO: 1657 - DNA, 21 bp, Homo sapiens
aaagaatatgatgagccgtat

SEQ ID NO: 1658 - RNA, 21 nt, RNAi-sense strand
agaauaugaugagccguauuu

SEQ ID NO: 1659 - RNA, 21 nt, RNAi-antisense strand
auacggcucaucauauucuuu

SEQ ID NO: 1660 - DNA, 21 bp, Homo sapiens
aagaatatgatgagccgtatg

SEQ ID NO: 1661 - RNA, 21 nt, RNAi-sense strand
gaauaugaugagccguauguu

SEQ ID NO: 1662 - RNA, 21 nt, RNAi-antisense strand
cauacggcucaucauauucuu

SEQ ID NO: 1663 - DNA, 21 bp, Homo sapiens
aatatgatgagccgtatgttt

SEQ ID NO: 1664 - RNA, 21 nt, RNAi-sense strand
uaugaugagccguauguuuuu

SEQ ID NO: 1665 - RNA, 21 nt, RNAi-antisense strand
aaacauacggcucaucauauu

SEQ ID NO: 1666 - DNA, 21 bp, Homo sapiens
cacttcgtcttagtaacatgg

SEQ ID NO: 1667 - RNA, 21 nt, RNAi-sense strand
cuucgucuuaguaacaugguu

SEQ ID NO: 1668 - RNA, 21 nt, RNAi-antisense strand
ccauguuacuaagacgaaguu

SEQ ID NO: 1669 - DNA, 21 bp, Homo sapiens
cacaggccagatagtcaatct

SEQ ID NO: 1670 - RNA, 21 nt, RNAi-sense strand
caggccagauagucaaucuuu

SEQ ID NO: 1671 - RNA, 21 nt, RNAi-antisense strand
agauugacuaucuggccuguu

SEQ ID NO: 1672 - DNA, 21 bp, Homo sapiens
caatcgtcagcatccgaagaa

SEQ ID NO: 1673 - RNA, 21 nt, RNAi-sense strand
aucgucagcauccgaagaauu

SEQ ID NO: 1674 - RNA, 21 nt, RNAi-antisense strand
uucuucggaugcugacgauuu

SEQ ID NO: 1675 - DNA, 21 bp, Homo sapiens
cagctgccgtcagatggtaaa

SEQ ID NO: 1676 - RNA, 21 nt, RNAi-sense strand
gcugccgucagaugguaaauu

SEQ ID NO: 1677 - RNA, 21 nt, RNAi-antisense strand
uuuaccaucugacggcagcuu

SEQ ID NO: 1678 - DNA, 21 bp, Homo sapiens
caaggcctttcctttactgtc

SEQ ID NO: 1679 - RNA, 21 nt, RNAi-sense strand
aggccuuuccuuuacugucuu

SEQ ID NO: 1680 - RNA, 21 nt, RNAi-antisense strand
gacaguaaaggaaaggccuuu

SEQ ID NO: 1681 - DNA, 21 bp, Homo sapiens
cagacctggcgaattgttagc

SEQ ID NO: 1682 - RNA, 21 nt, RNAi-sense strand
gaccuggcgaauuguuagcuu

SEQ ID NO: 1683 - RNA, 21 nt, RNAi-antisense strand
gcuaacaauucgccaggucuu

SEQ ID NO: 1684 - DNA, 21 bp, Homo sapiens
cagcgtgcatggaagaattgc

SEQ ID NO: 1685 - RNA, 21 nt, RNAi-sense strand
gcgugcauggaagaauugcuu

SEQ ID NO: 1686 - RNA, 21 nt, RNAi-antisense strand
gcaauucuuccaugcacgcuu

SEQ ID NO: 1687 - DNA, 21 bp, Homo sapiens
catctatctcctggacgatcc

SEQ ID NO: 1688 - RNA, 21 nt, RNAi-sense strand
ucuaucuccuggacgauccuu

SEQ ID NO: 1689 - RNA, 21 nt, RNAi-antisense strand
ggaucguccaggagauagauu

SEQ ID NO: 1690 - DNA, 21 bp, Homo sapiens
cagtgcagtagatgcggaagt

SEQ ID NO: 1691 - RNA, 21 nt, RNAi-sense strand
gugcaguagaugcggaaguuu

SEQ ID NO: 1692 - RNA, 21 nt, RNAi-antisense strand
acuuccgcaucuacugcacuu

SEQ ID NO: 1693 - DNA, 21 bp, Homo sapiens
cagtagatgcggaagttagca

SEQ ID NO: 1694 - RNA, 21 nt, RNAi-sense strand
guagaugcggaaguuagcauu

SEQ ID NO: 1695 - RNA, 21 nt, RNAi-antisense strand
ugcuaacuuccgcaucuacuu

SEQ ID NO: 1696 - DNA, 21 bp, Homo sapiens
cagacacttgttcgaactgtg

SEQ ID NO: 1697 - RNA, 21 nt, RNAi-sense strand
gacacuuguucgaacuguguu

SEQ ID NO: 1698 - RNA, 21 nt, RNAi-antisense strand
cacaguucgaacaagugucuu

SEQ ID NO: 1699 - DNA, 21 bp, Homo sapiens
cacttgttcgaactgtgtatt

SEQ ID NO: 1700 - RNA, 21 nt, RNAi-sense strand
cuuguucgaacuguguauuuu

SEQ ID NO: 1701 - RNA, 21 nt, RNAi-antisense strand
aauacacaguucgaacaaguu

SEQ ID NO: 1702 - DNA, 21 bp, Homo sapiens
catcagttgcagtacctcaaa

SEQ ID NO: 1703 - RNA, 21 nt, RNAi-sense strand
ucaguugcaguaccucaaauu

SEQ ID NO: 1704 - RNA, 21 nt, RNAi-antisense strand
uuugagguacugcaacugauu

SEQ ID NO: 1705 - DNA, 21 bp, Homo sapiens
cagttgcagtacctcaaagct

SEQ ID NO: 1706 - RNA, 21 nt, RNAi-sense strand
guugcaguaccucaaagcuuu

SEQ ID NO: 1707 - RNA, 21 nt, RNAi-antisense strand
agcuuugagguacugcaacuu

SEQ ID NO: 1708 - DNA, 21 bp, Homo sapiens
cacactaaggaatcgtacctt

SEQ ID NO: 1709 - RNA, 21 nt, RNAi-sense strand
cacuaaggaaucguaccuuuu

SEQ ID NO: 1710 - RNA, 21 nt, RNAi-antisense strand
aagguacgauuccuuaguguu

SEQ ID NO: 1711 - DNA, 21 bp, Homo sapiens
cactaaggaatcgtaccttct

SEQ ID NO: 1712 - RNA, 21 nt, RNAi-sense strand
cuaaggaaucguaccuucuuu

SEQ ID NO: 1713 - RNA, 21 nt, RNAi-antisense strand
agaagguacgauuccuuaguu

SEQ ID NO: 1714 - DNA, 21 bp, Homo sapiens
cagagtcttcggtttggtctc

SEQ ID NO: 1715 - RNA, 21 nt, RNAi-sense strand
gagucuucgguuuggucucuu

SEQ ID NO: 1716 - RNA, 21 nt, RNAi-antisense strand
gagaccaaaccgaagacucuu

SEQ ID NO: 1717 - DNA, 21 bp, Homo sapiens
cagttacactatcagaggaga

SEQ ID NO: 1718 - RNA, 21 nt, RNAi-sense strand
guuacacuaucagaggagauu

SEQ ID NO: 1719 - RNA, 21 nt, RNAi-antisense strand
ucuccucugauaguguaacuu

SEQ ID NO: 1720 - DNA, 21 bp, Homo sapiens
caggttgcctatgtgcttcaa

SEQ ID NO: 1721 - RNA, 21 nt, RNAi-sense strand
gguugccuaugugcuucaauu

SEQ ID NO: 1722 - RNA, 21 nt, RNAi-antisense strand
uugaagcacauaggcaaccuu

SEQ ID NO: 1723 - DNA, 21 bp, Homo sapiens
caattctgaaagctccggtat

SEQ ID NO: 1724 - RNA, 21 nt, RNAi-sense strand
auucugaaagcuccgguauuu

SEQ ID NO: 1725 - RNA, 21 nt, RNAi-antisense strand
auaccggagcuuucagaauuu

SEQ ID NO: 1726 - DNA, 21 bp, Homo sapiens
catccagacattgctacaagt

SEQ ID NO: 1727 - RNA, 21 nt, RNAi-sense strand
uccagacauugcuacaaguuu

SEQ ID NO: 1728 - RNA, 21 nt, RNAi-antisense strand
acuuguagcaaugucuggauu

SEQ ID NO: 1729 - DNA, 21 bp, Homo sapiens
cattgctacaagtggttggtg

SEQ ID NO: 1730 - RNA, 21 nt, RNAi-sense strand
uugcuacaagugguugguguu

SEQ ID NO: 1731 - RNA, 21 nt, RNAi-antisense strand
caccaaccacuuguagcaauu

SEQ ID NO: 1732 - DNA, 21 bp, Homo sapiens
caggaactgtttgatgcacac

SEQ ID NO: 1733 - RNA, 21 nt, RNAi-sense strand
ggaacuguuugaugcacacuu

SEQ ID NO: 1734 - RNA, 21 nt, RNAi-antisense strand
gugugcaucaaacaguuccuu

SEQ ID NO: 1735 - DNA, 21 bp, Homo sapiens
cagtggtgtgttcgacaaagt

SEQ ID NO: 1736 - RNA, 21 nt, RNAi-sense strand
gugguguguucgacaaaguuu

SEQ ID NO: 1737 - RNA, 21 nt, RNAi-antisense strand
acuuugucgaacacaccacuu

SEQ ID NO: 1738 - DNA, 21 bp, Homo sapiens
cagcactcattaaatcacaag

SEQ ID NO: 1739 - RNA, 21 nt, RNAi-sense strand
gcacucauuaaaucacaaguu

SEQ ID NO: 1740 - RNA, 21 nt, RNAi-antisense strand
cuugugauuuaaugagugcuu

SEQ ID NO: 1741 - DNA, 21 bp, Homo sapiens
caactgaaattggacttcacg

SEQ ID NO: 1742 - RNA, 21 nt, RNAi-sense strand
acugaaauuggacuucacguu

SEQ ID NO: 1743 - RNA, 21 nt, RNAi-antisense strand
cgugaaguccaauuucaguuu

SEQ ID NO: 1744 - DNA, 21 bp, Homo sapiens
caaagacaactggtgtgcctt

SEQ ID NO: 1745 - RNA, 21 nt, RNAi-sense strand
aagacaacuggugugccuuuu

SEQ ID NO: 1746 - RNA, 21 nt, RNAi-antisense strand
aaggcacaccaguugucuuuu

SEQ ID NO: 1747 - DNA, 21 bp, Homo sapiens
caccgtgctaaccattgcaca

SEQ ID NO: 1748 - RNA, 21 nt, RNAi-sense strand
ccgugcuaaccauugcacauu

SEQ ID NO: 1749 - RNA, 21 nt, RNAi-antisense strand
ugugcaaugguuagcacgguu

SEQ ID NO: 1750 - DNA, 21 bp, Homo sapiens
caccattattgacagcgacaa

SEQ ID NO: 1751 - RNA, 21 nt, RNAi-sense strand
ccauuauugacagcgacaauu

SEQ ID NO: 1752 - RNA, 21 nt, RNAi-antisense strand
uugucgcugucaauaaugguu

SEQ ID NO: 1753 - DNA, 21 bp, Homo sapiens
gatgatatgtattcagtgctg

SEQ ID NO: 1754 - RNA, 21 nt, RNAi-sense strand
ugauauguauucagugcuguu

SEQ ID NO: 1755 - RNA, 21 nt, RNAi-antisense strand
cagcacugaauacauaucauu

SEQ ID NO: 1756 - DNA, 21 bp, Homo sapiens
gatatgtattcagtgctgcca

SEQ ID NO: 1757 - RNA, 21 nt, RNAi-sense strand
uauguauucagugcugccauu

SEQ ID NO: 1758 - RNA, 21 nt, RNAi-antisense strand
uggcagcacugaauacauauu

SEQ ID NO: 1759 - DNA, 21 bp, Homo sapiens
gagctgagaatgacgcacaga

SEQ ID NO: 1760 - RNA, 21 nt, RNAi-sense strand
gcugagaaugacgcacagauu

SEQ ID NO: 1761 - RNA, 21 nt, RNAi-antisense strand
ucugugcgucauucucagcuu

SEQ ID NO: 1762 - DNA, 21 bp, Homo sapiens
gagaatgacgcacagaagcct

SEQ ID NO: 1763 - RNA, 21 nt, RNAi-sense strand
gaaugacgcacagaagccuuu

SEQ ID NO: 1764 - RNA, 21 nt, RNAi-antisense strand
aggcuucugugcgucauucuu

SEQ ID NO: 1765 - DNA, 21 bp, Homo sapiens
gaaagtgccaaagtaatccag

SEQ ID NO: 1766 - RNA, 21 nt, RNAi-sense strand
aagugccaaaguaauccaguu

SEQ ID NO: 1767 - RNA, 21 nt, RNAi-antisense strand
cuggauuacuuuggcacuuuu

SEQ ID NO: 1768 - DNA, 21 bp, Homo sapiens
gatgaggttacgagtagccat

SEQ ID NO: 1769 - RNA, 21 nt, RNAi-sense strand
ugagguuacgaguagccauuu

SEQ ID NO: 1770 - RNA, 21 nt, RNAi-antisense strand
auggcuacucguaaccucauu

SEQ ID NO: 1771 - DNA, 21 bp, Homo sapiens
gaggttacgagtagccatgtg

SEQ ID NO: 1772 - RNA, 21 nt, RNAi-sense strand
gguuacgaguagccauguguu

SEQ ID NO: 1773 - RNA, 21 nt, RNAi-antisense strand
cacauggcuacucguaaccuu

SEQ ID NO: 1774 - DNA, 21 bp, Homo sapiens
gaaggcacttcgtcttagtaa

SEQ ID NO: 1775 - RNA, 21 nt, RNAi-sense strand
aggcacuucgucuuaguaauu

SEQ ID NO: 1776 - RNA, 21 nt, RNAi-antisense strand
uuacuaagacgaagugccuuu

SEQ ID NO: 1777 - DNA, 21 bp, Homo sapiens
gatgtgaacaagtttgatcag

SEQ ID NO: 1778 - RNA, 21 nt, RNAi-sense strand
ugugaacaaguuugaucaguu

SEQ ID NO: 1779 - RNA, 21 nt, RNAi-antisense strand
cugaucaaacuuguucacauu

SEQ ID NO: 1780 - DNA, 21 bp, Homo sapiens
gaacaagtttgatcaggtgac

SEQ ID NO: 1781 - RNA, 21 nt, RNAi-sense strand
acaaguuugaucaggugacuu

SEQ ID NO: 1782 - RNA, 21 nt, RNAi-antisense strand
gucaccugaucaaacuuguuu

SEQ ID NO: 1783 - DNA, 21 bp, Homo sapiens
gatggagataggaatatcgtg

SEQ ID NO: 1784 - RNA, 21 nt, RNAi-sense strand
uggagauaggaauaucguguu

SEQ ID NO: 1785 - RNA, 21 nt, RNAi-antisense strand
cacgauauuccuaucuccauu

SEQ ID NO: 1786 - DNA, 21 bp, Homo sapiens
gagataggaatatcgtgcctt

SEQ ID NO: 1787 - RNA, 21 nt, RNAi-sense strand
gauaggaauaucgugccuuuu

SEQ ID NO: 1788 - RNA, 21 nt, RNAi-antisense strand
aaggcacgauauuccuaucuu

SEQ ID NO: 1789 - DNA, 21 bp, Homo sapiens
gatggcagttctaatcattct

SEQ ID NO: 1790 - RNA, 21 nt, RNAi-sense strand
uggcaguucuaaucauucuuu

SEQ ID NO: 1791 - RNA, 21 nt, RNAi-antisense strand
agaaugauuagaacugccauu

SEQ ID NO: 1792 - DNA, 21 bp, Homo sapiens
gatgagatatcacagcgcaac

SEQ ID NO: 1793 - RNA, 21 nt, RNAi-sense strand
ugagauaucacagcgcaacuu

SEQ ID NO: 1794 - RNA, 21 nt, RNAi-antisense strand
guugcgcugugauaucucauu

SEQ ID NO: 1795 - DNA, 21 bp, Homo sapiens
gagatatcacagcgcaaccgt

SEQ ID NO: 1796 - RNA, 21 nt, RNAi-sense strand
gauaucacagcgcaaccguuu

SEQ ID NO: 1797 - RNA, 21 nt, RNAi-antisense strand
acgguugcgcugugauaucuu

SEQ ID NO: 1798 - DNA, 21 bp, Homo sapiens
gatatcacagcgcaaccgtca

SEQ ID NO: 1799 - RNA, 21 nt, RNAi-sense strand
uaucacagcgcaaccgucauu

SEQ ID NO: 1800 - RNA, 21 nt, RNAi-antisense strand
ugacgguugcgcugugauauu

SEQ ID NO: 1801 - DNA, 21 bp, Homo sapiens
gaattgttagctgtggtcggc

SEQ ID NO: 1802 - RNA, 21 nt, RNAi-sense strand
auuguuagcuguggucggcuu

SEQ ID NO: 1803 - RNA, 21 nt, RNAi-antisense strand
gccgaccacagcuaacaauuu

SEQ ID NO: 1804 - DNA, 21 bp, Homo sapiens
gaggatggtgatctgactgtg

SEQ ID NO: 1805 - RNA, 21 nt, RNAi-sense strand
ggauggugaucugacuguguu

SEQ ID NO: 1806 - RNA, 21 nt, RNAi-antisense strand
cacagucagaucaccauccuu

SEQ ID NO: 1807 - DNA, 21 bp, Homo sapiens
gatggtgatctgactgtgata

SEQ ID NO: 1808 - RNA, 21 nt, RNAi-sense strand
uggugaucugacugugauauu

SEQ ID NO: 1809 - RNA, 21 nt, RNAi-antisense strand
uaucacagucagaucaccauu

SEQ ID NO: 1810 - DNA, 21 bp, Homo sapiens
gagcagtgtatcaagatgctg

SEQ ID NO: 1811 - RNA, 21 nt, RNAi-sense strand
gcaguguaucaagaugcuguu

SEQ ID NO: 1812 - RNA, 21 nt, RNAi-antisense strand
cagcaucuugauacacugcuu

SEQ ID NO: 1813 - DNA, 21 bp, Homo sapiens
gatgcggaagttagcagacac

SEQ ID NO: 1814 - RNA, 21 nt, RNAi-sense strand
ugcggaaguuagcagacacuu

SEQ ID NO: 1815 - RNA, 21 nt, RNAi-antisense strand
gugucugcuaacuuccgcauu

SEQ ID NO: 1816 - DNA, 21 bp, Homo sapiens
gacacttgttcgaactgtgta

SEQ ID NO: 1817 - RNA, 21 nt, RNAi-sense strand
cacuuguucgaacuguguauu

SEQ ID NO: 1818 - RNA, 21 nt, RNAi-antisense strand
uacacaguucgaacaaguguu

SEQ ID NO: 1819 - DNA, 21 bp, Homo sapiens
gactcatcagttgcagtacct

SEQ ID NO: 1820 - RNA, 21 nt, RNAi-sense strand
cucaucaguugcaguaccuuu

SEQ ID NO: 1821 - RNA, 21 nt, RNAi-antisense strand
agguacugcaacugaugaguu

SEQ ID NO: 1822 - DNA, 21 bp, Homo sapiens
gacttacactgagttcctaaa

SEQ ID NO: 1823 - RNA, 21 nt, RNAi-sense strand
cuuacacugaguuccuaaauu

SEQ ID NO: 1824 - RNA, 21 nt, RNAi-antisense strand
uuuaggaacucaguguaaguu

SEQ ID NO: 1825 - DNA, 21 bp, Homo sapiens
gaatcgtaccttctcagagtc

SEQ ID NO: 1826 - RNA, 21 nt, RNAi-sense strand
aucguaccuucucagagucuu

SEQ ID NO: 1827 - RNA, 21 nt, RNAi-antisense strand
gacucugagaagguacgauuu

SEQ ID NO: 1828 - DNA, 21 bp, Homo sapiens
gagtcttcggtttggtctcaa

SEQ ID NO: 1829 - RNA, 21 nt, RNAi-sense strand
gucuucgguuuggucucaauu

SEQ ID NO: 1830 - RNA, 21 nt, RNAi-antisense strand
uugagaccaaaccgaagacuu

SEQ ID NO: 1831 - DNA, 21 bp, Homo sapiens
gaggaggaaatgtaaccgaga

SEQ ID NO: 1832 - RNA, 21 nt, RNAi-sense strand
ggaggaaauguaaccgagauu

SEQ ID NO: 1833 - RNA, 21 nt, RNAi-antisense strand
ucucgguuacauuuccuccuu

SEQ ID NO: 1834 - DNA, 21 bp, Homo sapiens
gaggaaatgtaaccgagaagc

SEQ ID NO: 1835 - RNA, 21 nt, RNAi-sense strand
ggaaauguaaccgagaagcuu

SEQ ID NO: 1836 - RNA, 21 nt, RNAi-antisense strand
gcuucucgguuacauuuccuu

SEQ ID NO: 1837 - DNA, 21 bp, Homo sapiens
gaaatgtaaccgagaagctag

SEQ ID NO: 1838 - RNA, 21 nt, RNAi-sense strand
aauguaaccgagaagcuaguu

SEQ ID NO: 1839 - RNA, 21 nt, RNAi-antisense strand
cuagcuucucgguuacauuuu

SEQ ID NO: 1840 - DNA, 21 bp, Homo sapiens
gatctctattggtattctacg

SEQ ID NO: 1841 - RNA, 21 nt, RNAi-sense strand
ucucuauugguauucuacguu

SEQ ID NO: 1842 - RNA, 21 nt, RNAi-antisense strand
cguagaauaccaauagagauu

SEQ ID NO: 1843 - DNA, 21 bp, Homo sapiens
gacattgctacaagtggttgg

SEQ ID NO: 1844 - RNA, 21 nt, RNAi-sense strand
cauugcuacaagugguugguu

SEQ ID NO: 1845 - RNA, 21 nt, RNAi-antisense strand
ccaaccacuuguagcaauguu

SEQ ID NO: 1846 - DNA, 21 bp, Homo sapiens
gaaacgtcaagagatgtgaag

SEQ ID NO: 1847 - RNA, 21 nt, RNAi-sense strand
aacgucaagagaugugaaguu

SEQ ID NO: 1848 - RNA, 21 nt, RNAi-antisense strand
cuucacaucucuugacguuuu

SEQ ID NO: 1849 - DNA, 21 bp, Homo sapiens
gagatgtgaagcgcctggaat

SEQ ID NO: 1850 - RNA, 21 nt, RNAi-sense strand
gaugugaagcgccuggaauuu

SEQ ID NO: 1851 - RNA, 21 nt, RNAi-antisense strand
auuccaggcgcuucacaucuu

SEQ ID NO: 1852 - DNA, 21 bp, Homo sapiens
gatgtgaagcgcctggaatct

SEQ ID NO: 1853 - RNA, 21 nt, RNAi-sense strand
ugugaagcgccuggaaucuuu

SEQ ID NO: 1854 - RNA, 21 nt, RNAi-antisense strand
agauuccaggcgcuucacauu

SEQ ID NO: 1855 - DNA, 21 bp, Homo sapiens
gaagcgcctggaatctacaac

SEQ ID NO: 1856 - RNA, 21 nt, RNAi-sense strand
agcgccuggaaucuacaacuu

SEQ ID NO: 1857 - RNA, 21 nt, RNAi-antisense strand
guuguagauuccaggcgcuuu

SEQ ID NO: 1858 - DNA, 21 bp, Homo sapiens
gaatctacaactcggagtcca

SEQ ID NO: 1859 - RNA, 21 nt, RNAi-sense strand
aucuacaacucggaguccauu

SEQ ID NO: 1860 - RNA, 21 nt, RNAi-antisense strand
uggacuccgaguuguagauuu

SEQ ID NO: 1861 - DNA, 21 bp, Homo sapiens
gacagcactcattaaatcaca

SEQ ID NO: 1862 - RNA, 21 nt, RNAi-sense strand
cagcacucauuaaaucacauu

SEQ ID NO: 1863 - RNA, 21 nt, RNAi-antisense strand
ugugauuuaaugagugcuguu

SEQ ID NO: 1864 - DNA, 21 bp, Homo sapiens
gacaactgaaattggacttca

SEQ ID NO: 1865 - RNA, 21 nt, RNAi-sense strand
caacugaaauuggacuucauu

SEQ ID NO: 1866 - RNA, 21 nt, RNAi-antisense strand
ugaaguccaauuucaguuguu

SEQ ID NO: 1867 - DNA, 21 bp, Homo sapiens
gacaaagacaactggtgtgcc

SEQ ID NO: 1868 - RNA, 21 nt, RNAi-sense strand
caaagacaacuggugugccuu

SEQ ID NO: 1869 - RNA, 21 nt, RNAi-antisense strand
ggcacaccaguugucuuuguu

SEQ ID NO: 1870 - DNA, 21 bp, Homo sapiens
gattattgatgaagcgacggc

SEQ ID NO: 1871 - RNA, 21 nt, RNAi-sense strand
uuauugaugaagcgacggcuu

SEQ ID NO: 1872 - RNA, 21 nt, RNAi-antisense strand
gccgucgcuucaucaauaauu

SEQ ID NO: 1873 - DNA, 21 bp, Homo sapiens
gatgaagcgacggcaaatgtg

SEQ ID NO: 1874 - RNA, 21 nt, RNAi-sense strand
ugaagcgacggcaaauguguu

SEQ ID NO: 1875 - RNA, 21 nt, RNAi-antisense strand
cacauuugccgucgcuucauu

SEQ ID NO: 1876 - DNA, 21 bp, Homo sapiens
gaagcgacggcaaatgtggat

SEQ ID NO: 1877 - RNA, 21 nt, RNAi-sense strand
agcgacggcaaauguggauuu

SEQ ID NO: 1878 - RNA, 21 nt, RNAi-antisense strand
auccacauuugccgucgcuuu

SEQ ID NO: 1879 - DNA, 21 bp, Homo sapiens
gaacaccattattgacagcga

SEQ ID NO: 1880 - RNA, 21 nt, RNAi-sense strand
acaccauuauugacagcgauu

SEQ ID NO: 1881 - RNA, 21 nt, RNAi-antisense strand
ucgcugucaauaaugguguuu

SEQ ID NO: 1882 - DNA, 21 bp, Homo sapiens
gacagcgacaagataatggtt

SEQ ID NO: 1883 - RNA, 21 nt, RNAi-sense strand
cagcgacaagauaaugguuuu

SEQ ID NO: 1884 - RNA, 21 nt, RNAi-antisense strand
aaccauuaucuugucgcuguu

SEQ ID NO: 1885 - DNA, 21 bp, Homo sapiens
gaaagaatatgatgagccgta

SEQ ID NO: 1886 - RNA, 21 nt, RNAi-sense strand
aagaauaugaugagccguauu

SEQ ID NO: 1887 - RNA, 21 nt, RNAi-antisense strand
uacggcucaucauauucuuuu

SEQ ID NO: 1888 - DNA, 21 bp, Homo sapiens
gaatatgatgagccgtatgtt

SEQ ID NO: 1889 - RNA, 21 nt, RNAi-sense strand
auaugaugagccguauguuuu

SEQ ID NO: 1890 - RNA, 21 nt, RNAi-antisense strand
aacauacggcucaucauauuu

SEQ ID NO: 1891 - DNA, 21 bp, Homo sapiens
taagagctgagaatgacgcac

SEQ ID NO: 1892 - RNA, 21 nt, RNAi-sense strand
agagcugagaaugacgcacuu

SEQ ID NO: 1893 - RNA, 21 nt, RNAi-antisense strand
gugcgucauucucagcucuuu

SEQ ID NO: 1894 - DNA, 21 bp, Homo sapiens
tatcggaaggcacttcgtctt

SEQ ID NO: 1895 - RNA, 21 nt, RNAi-sense strand
ucggaaggcacuucgucuuuu

SEQ ID NO: 1896 - RNA, 21 nt, RNAi-antisense strand
aagacgaagugccuuccgauu

SEQ ID NO: 1897 - DNA, 21 bp, Homo sapiens
tagtcaatctgctgtccaatg

SEQ ID NO: 1898 - RNA, 21 nt, RNAi-sense strand
gucaaucugcuguccaauguu

SEQ ID NO: 1899 - RNA, 21 nt, RNAi-antisense strand
cauuggacagcagauugacuu

SEQ ID NO: 1900 - DNA, 21 bp, Homo sapiens
tactgtcagacctggcgaatt

SEQ ID NO: 1901 - RNA, 21 nt, RNAi-sense strand
cugucagaccuggcgaauuuu

SEQ ID NO: 1902 - RNA, 21 nt, RNAi-antisense strand
aauucgccaggucugacaguu

SEQ ID NO: 1903 - DNA, 21 bp, Homo sapiens
tagatgcggaagttagcagac

SEQ ID NO: 1904 - RNA, 21 nt, RNAi-sense strand
gaugcggaaguuagcagacuu

SEQ ID NO: 1905 - RNA, 21 nt, RNAi-antisense strand
gucugcuaacuuccgcaucuu

SEQ ID NO: 1906 - DNA, 21 bp, Homo sapiens
tagcagacacttgttcgaact

SEQ ID NO: 1907 - RNA, 21 nt, RNAi-sense strand
gcagacacuuguucgaacuuu

SEQ ID NO: 1908 - RNA, 21 nt, RNAi-antisense strand
aguucgaacaagugucugcuu

SEQ ID NO: 1909 - DNA, 21 bp, Homo sapiens
tagtgactcatcagttgcagt

SEQ ID NO: 1910 - RNA, 21 nt, RNAi-sense strand
gugacucaucaguugcaguuu

SEQ ID NO: 1911 - RNA, 21 nt, RNAi-antisense strand
acugcaacugaugagucacuu

SEQ ID NO: 1912 - DNA, 21 bp, Homo sapiens
taaggaatcgtaccttctcag

SEQ ID NO: 1913 - RNA, 21 nt, RNAi-sense strand
aggaaucguaccuucucaguu

SEQ ID NO: 1914 - RNA, 21 nt, RNAi-antisense strand
cugagaagguacgauuccuuu

SEQ ID NO: 1915 - DNA, 21 bp, Homo sapiens
tatgtgcttcaagattggtgg

SEQ ID NO: 1916 - RNA, 21 nt, RNAi-sense strand
ugugcuucaagauuggugguu

SEQ ID NO: 1917 - RNA, 21 nt, RNAi-antisense strand
ccaccaaucuugaagcacauu

SEQ ID NO: 1918 - DNA, 21 bp, Homo sapiens
taactgtagctaccgttcttt

SEQ ID NO: 1919 - RNA, 21 nt, RNAi-sense strand
acuguagcuaccguucuuuuu

SEQ ID NO: 1920 - RNA, 21 nt, RNAi-antisense strand
aaagaacgguagcuacaguuu

SEQ ID NO: 1921 - DNA, 21 bp, Homo sapiens
tattggtattctacgtccttg

SEQ ID NO: 1922 - RNA, 21 nt, RNAi-sense strand
uugguauucuacguccuuguu

SEQ ID NO: 1923 - RNA, 21 nt, RNAi-antisense strand
caaggacguagaauaccaauu

SEQ ID NO: 1924 - DNA, 21 bp, Homo sapiens
tacaagaggtacaacttaaag

SEQ ID NO: 1925 - RNA, 21 nt, RNAi-sense strand
caagagguacaacuuaaaguu

SEQ ID NO: 1926 - RNA, 21 nt, RNAi-antisense strand
cuuuaaguuguaccucuuguu

SEQ ID NO: 1927 - DNA, 21 bp, Homo sapiens
tactgaattagcagaatcagg

SEQ ID NO: 1928 - RNA, 21 nt, RNAi-sense strand
cugaauuagcagaaucagguu

SEQ ID NO: 1929 - RNA, 21 nt, RNAi-antisense strand
ccugauucugcuaauucaguu

SEQ ID NO: 1930 - DNA, 21 bp, Homo sapiens
tagtgttggacaaagacaact

SEQ ID NO: 1931 - RNA, 21 nt, RNAi-sense strand
guguuggacaaagacaacuuu

SEQ ID NO: 1932 - RNA, 21 nt, RNAi-antisense strand
aguugucuuuguccaacacuu

SEQ ID NO: 1933 - DNA, 21 bp, Homo sapiens
tattgatgaagcgacggcaaa

SEQ ID NO: 1934 - RNA, 21 nt, RNAi-sense strand
uugaugaagcgacggcaaauu

SEQ ID NO: 1935 - RNA, 21 nt, RNAi-antisense strand
uuugccgucgcuucaucaauu

SEQ ID NO: 1936 - DNA, 21 bp, Homo sapiens
aatggctcaaatcatggcaga

SEQ ID NO: 1937 - RNA, 21 nt, RNAi-sense strand
uggcucaaaucauggcagauu

SEQ ID NO: 1938 - RNA, 21 nt, RNAi-antisense strand
ucugccaugauuugagccauu

SEQ ID NO: 1939 - DNA, 21 bp, Homo sapiens
aaatcatggcagaacaagaag

SEQ ID NO: 1940 - RNA, 21 nt, RNAi-sense strand
aucauggcagaacaagaaguu

SEQ ID NO: 1941 - RNA, 21 nt, RNAi-antisense strand
cuucuuguucugccaugauuu

SEQ ID NO: 1942 - DNA, 21 bp, Homo sapiens
aatcatggcagaacaagaagt

SEQ ID NO: 1943 - RNA, 21 nt, RNAi-sense strand
ucauggcagaacaagaaguuu

SEQ ID NO: 1944 - RNA, 21 nt, RNAi-antisense strand
acuucuuguucugccaugauu

SEQ ID NO: 1945 - DNA, 21 bp, Homo sapiens
aaatctctcaggcctttccac

SEQ ID NO: 1946 - RNA, 21 nt, RNAi-sense strand
aucucucaggccuuuccacuu

SEQ ID NO: 1947 - RNA, 21 nt, RNAi-antisense strand
guggaaaggccugagagauuu

SEQ ID NO: 1948 - DNA, 21 bp, Homo sapiens
aatctctcaggcctttccact

SEQ ID NO: 1949 - RNA, 21 nt, RNAi-sense strand
ucucucaggccuuuccacuuu

SEQ ID NO: 1950 - RNA, 21 nt, RNAi-antisense strand
aguggaaaggccugagagauu

SEQ ID NO: 1951 - DNA, 21 bp, Homo sapiens
aaagatatatttgtggtgcgg

SEQ ID NO: 1952 - RNA, 21 nt, RNAi-sense strand
agauauauuuguggugcgguu

SEQ ID NO: 1953 - RNA, 21 nt, RNAi-antisense strand
ccgcaccacaaauauaucuuu

SEQ ID NO: 1954 - DNA, 21 bp, Homo sapiens
aactacgtagatctgatcaca

SEQ ID NO: 1955 - RNA, 21 nt, RNAi-sense strand
cuacguagaucugaucacauu

SEQ ID NO: 1956 - RNA, 21 nt, RNAi-antisense strand
ugugaucagaucuacguaguu

SEQ ID NO: 1957 - DNA, 21 bp, Homo sapiens
aacaggccgatatcgcattga

SEQ ID NO: 1958 - RNA, 21 nt, RNAi-sense strand
caggccgauaucgcauugauu

SEQ ID NO: 1959 - RNA, 21 nt, RNAi-antisense strand
ucaaugcgauaucggccuguu

SEQ ID NO: 1960 - DNA, 21 bp, Homo sapiens
aatgctctttgtaaaggaaag

SEQ ID NO: 1961 - RNA, 21 nt, RNAi-sense strand
ugcucuuuguaaaggaaaguu

SEQ ID NO: 1962 - RNA, 21 nt, RNAi-antisense strand
cuuuccuuuacaaagagcauu

SEQ ID NO: 1963 - DNA, 21 bp, Homo sapiens
aaaggaaagccacaacatgtc

SEQ ID NO: 1964 - RNA, 21 nt, RNAi-sense strand
aggaaagccacaacaugucuu

SEQ ID NO: 1965 - RNA, 21 nt, RNAi-antisense strand
gacauguuguggcuuuccuuu

SEQ ID NO: 1966 - DNA, 21 bp, Homo sapiens
aaggaaagccacaacatgtcc

SEQ ID NO: 1967 - RNA, 21 nt, RNAi-sense strand
ggaaagccacaacauguccuu

SEQ ID NO: 1968 - RNA, 21 nt, RNAi-antisense strand
ggacauguuguggcuuuccuu

SEQ ID NO: 1969 - DNA, 21 bp, Homo sapiens
aaagccacaacatgtccaagg

SEQ ID NO: 1970 - RNA, 21 nt, RNAi-sense strand
agccacaacauguccaagguu

SEQ ID NO: 1971 - RNA, 21 nt, RNAi-antisense strand
ccuuggacauguuguggcuuu

SEQ ID NO: 1972 - DNA, 21 bp, Homo sapiens
aaagtgcagtttgtctacgac

SEQ ID NO: 1973 - RNA, 21 nt, RNAi-sense strand
agugcaguuugucuacgacuu

SEQ ID NO: 1974 - RNA, 21 nt, RNAi-antisense strand
gucguagacaaacugcacuuu

SEQ ID NO: 1975 - DNA, 21 bp, Homo sapiens
aagtgcagtttgtctacgact

SEQ ID NO: 1976 - RNA, 21 nt, RNAi-sense strand
gugcaguuugucuacgacuuu

SEQ ID NO: 1977 - RNA, 21 nt, RNAi-antisense strand
agucguagacaaacugcacuu

SEQ ID NO: 1978 - DNA, 21 bp, Homo sapiens
aagcacacagccaactcgcac

SEQ ID NO: 1979 - RNA, 21 nt, RNAi-sense strand
gcacacagccaacucgcacuu

SEQ ID NO: 1980 - RNA, 21 nt, RNAi-antisense strand
gugcgaguuggcugugugcuu

SEQ ID NO: 1981 - DNA, 21 bp, Homo sapiens
aactcgcaccacctctctgcc

SEQ ID NO: 1982 - RNA, 21 nt, RNAi-sense strand
cucgcaccaccucucugccuu

SEQ ID NO: 1983 - RNA, 21 nt, RNAi-antisense strand
ggcagagagguggugcgaguu

SEQ ID NO: 1984 - DNA, 21 bp, Homo sapiens
aagtcctatgagtgtcaagct

SEQ ID NO: 1985 - RNA, 21 nt, RNAi-sense strand
guccuaugagugucaagcuuu

SEQ ID NO: 1986 - RNA, 21 nt, RNAi-antisense strand
agcuugacacucauaggacuu

SEQ ID NO: 1987 - DNA, 21 bp, Homo sapiens
aagctcaacaaaccatttcac

SEQ ID NO: 1988 - RNA, 21 nt, RNAi-sense strand
gcucaacaaaccauuucacuu

SEQ ID NO: 1989 - RNA, 21 nt, RNAi-antisense strand
gugaaaugguuuguugagcuu

SEQ ID NO: 1990 - DNA, 21 bp, Homo sapiens
aacaaaccatttcactggcct

SEQ ID NO: 1991 - RNA, 21 nt, RNAi-sense strand
caaaccauuucacuggccuuu

SEQ ID NO: 1992 - RNA, 21 nt, RNAi-antisense strand
aggccagugaaaugguuuguu

SEQ ID NO: 1993 - DNA, 21 bp, Homo sapiens
aaaccatttcactggcctcta

SEQ ID NO: 1994 - RNA, 21 nt, RNAi-sense strand
accauuucacuggccucuauu

SEQ ID NO: 1995 - RNA, 21 nt, RNAi-antisense strand
uagaggccagugaaaugguuu

SEQ ID NO: 1996 - DNA, 21 bp, Homo sapiens
aaccatttcactggcctctag

SEQ ID NO: 1997 - RNA, 21 nt, RNAi-sense strand
ccauuucacuggccucuaguu

SEQ ID NO: 1998 - RNA, 21 nt, RNAi-antisense strand
cuagaggccagugaaaugguu

SEQ ID NO: 1999 - DNA, 21 bp, Homo sapiens
aagacggtcaccatgatcctg

SEQ ID NO: 2000 - RNA, 21 nt, RNAi-sense strand
gacggucaccaugauccuguu

SEQ ID NO: 2001 - RNA, 21 nt, RNAi-antisense strand
caggaucauggugaccgucuu

SEQ ID NO: 2002 - DNA, 21 bp, Homo sapiens
aacactcgcgatttaccacgt

SEQ ID NO: 2003 - RNA, 21 nt, RNAi-sense strand
cacucgcgauuuaccacguuu

SEQ ID NO: 2004 - RNA, 21 nt, RNAi-antisense strand
acgugguaaaucgcgaguguu

SEQ ID NO: 2005 - DNA, 21 bp, Homo sapiens
aaatgactgccaaccaggtgc

SEQ ID NO: 2006 - RNA, 21 nt, RNAi-sense strand
augacugccaaccaggugcuu

SEQ ID NO: 2007 - RNA, 21 nt, RNAi-antisense strand
gcaccugguuggcagucauuu

SEQ ID NO: 2008 - DNA, 21 bp, Homo sapiens
aatgactgccaaccaggtgca

SEQ ID NO: 2009 - RNA, 21 nt, RNAi-sense strand
ugacugccaaccaggugcauu

SEQ ID NO: 2010 - RNA, 21 nt, RNAi-antisense strand
ugcaccugguuggcagucauu

SEQ ID NO: 2011 - DNA, 21 bp, Homo sapiens
aactggatcaggtagaacaac

SEQ ID NO: 2012 - RNA, 21 nt, RNAi-sense strand
cuggaucagguagaacaacuu

SEQ ID NO: 2013 - RNA, 21 nt, RNAi-antisense strand
guuguucuaccugauccaguu

SEQ ID NO: 2014 - DNA, 21 bp, Homo sapiens
aacatagctacaatcaaacag

SEQ ID NO: 2015 - RNA, 21 nt, RNAi-sense strand
cauagcuacaaucaaacaguu

SEQ ID NO: 2016 - RNA, 21 nt, RNAi-antisense strand
cuguuugauuguagcuauguu

SEQ ID NO: 2017 - DNA, 21 bp, Homo sapiens
aaatggcaattattctctcca

SEQ ID NO: 2018 - RNA, 21 nt, RNAi-sense strand
auggcaauuauucucuccauu

SEQ ID NO: 2019 - RNA, 21 nt, RNAi-antisense strand
uggagagaauaauugccauuu

SEQ ID NO: 2020 - DNA, 21 bp, Homo sapiens
aatggcaattattctctccat

SEQ ID NO: 2021 - RNA, 21 nt, RNAi-sense strand
uggcaauuauucucuccauuu

SEQ ID NO: 2022 - RNA, 21 nt, RNAi-antisense strand
auggagagaauaauugccauu

SEQ ID NO: 2023 - DNA, 21 bp, Homo sapiens
aaagagcaataaatgccactt

SEQ ID NO: 2024 - RNA, 21 nt, RNAi-sense strand
agagcaauaaaugccacuuuu

SEQ ID NO: 2025 - RNA, 21 nt, RNAi-antisense strand
aaguggcauuuauugcucuuu

SEQ ID NO: 2026 - DNA, 21 bp, Homo sapiens
aagagcaataaatgccacttg

SEQ ID NO: 2027 - RNA, 21 nt, RNAi-sense strand
gagcaauaaaugccacuuguu

SEQ ID NO: 2028 - RNA, 21 nt, RNAi-antisense strand
caaguggcauuuauugcucuu

SEQ ID NO: 2029 - DNA, 21 bp, Homo sapiens
aataaatgccacttggagctg

SEQ ID NO: 2030 - RNA, 21 nt, RNAi-sense strand
uaaaugccacuuggagcuguu

SEQ ID NO: 2031 - RNA, 21 nt, RNAi-antisense strand
cagcuccaaguggcauuuauu

SEQ ID NO: 2032 - DNA, 21 bp, Homo sapiens
aaatgccacttggagctgtat

SEQ ID NO: 2033 - RNA, 21 nt, RNAi-sense strand
augccacuuggagcuguauuu

SEQ ID NO: 2034 - RNA, 21 nt, RNAi-antisense strand
auacagcuccaaguggcauuu

SEQ ID NO: 2035 - DNA, 21 bp, Homo sapiens
aatgccacttggagctgtatc

SEQ ID NO: 2036 - RNA, 21 nt, RNAi-sense strand
ugccacuuggagcuguaucuu

SEQ ID NO: 2037 - RNA, 21 nt, RNAi-antisense strand
gauacagcuccaaguggcauu

SEQ ID NO: 2038 - DNA, 21 bp, Homo sapiens
aaacatgcttctttgaggagg

SEQ ID NO: 2039 - RNA, 21 nt, RNAi-sense strand
acaugcuucuuugaggagguu

SEQ ID NO: 2040 - RNA, 21 nt, RNAi-antisense strand
ccuccucaaagaagcauguuu

SEQ ID NO: 2041 - DNA, 21 bp, Homo sapiens
aacatgcttctttgaggagga

SEQ ID NO: 2042 - RNA, 21 nt, RNAi-sense strand
caugcuucuuugaggaggauu

SEQ ID NO: 2043 - RNA, 21 nt, RNAi-antisense strand
uccuccucaaagaagcauguu

SEQ ID NO: 2044 - DNA, 21 bp, Homo sapiens
aatgcacacagaatacaacct

SEQ ID NO: 2045 - RNA, 21 nt, RNAi-sense strand
ugcacacagaauacaaccuuu

SEQ ID NO: 2046 - RNA, 21 nt, RNAi-antisense strand
agguuguauucugugugcauu

SEQ ID NO: 2047 - DNA, 21 bp, Homo sapiens
aaagtgattcatgcttctggc

SEQ ID NO: 2048 - RNA, 21 nt, RNAi-sense strand
agugauucaugcuucuggcuu

SEQ ID NO: 2049 - RNA, 21 nt, RNAi-antisense strand
gccagaagcaugaaucacuuu

SEQ ID NO: 2050 - DNA, 21 bp, Homo sapiens
aagtgattcatgcttctggct

SEQ ID NO: 2051 - RNA, 21 nt, RNAi-sense strand
gugauucaugcuucuggcuuu

SEQ ID NO: 2052 - RNA, 21 nt, RNAi-antisense strand
agccagaagcaugaaucacuu

SEQ ID NO: 2053 - DNA, 21 bp, Homo sapiens
aaacgactaatgtaactatgc

SEQ ID NO: 2054 - RNA, 21 nt, RNAi-sense strand
acgacuaauguaacuaugcuu

SEQ ID NO: 2055 - RNA, 21 nt, RNAi-antisense strand
gcauaguuacauuagucguuu

SEQ ID NO: 2056 - DNA, 21 bp, Homo sapiens
aacgactaatgtaactatgca

SEQ ID NO: 2057 - RNA, 21 nt, RNAi-sense strand
cgacuaauguaacuaugcauu

SEQ ID NO: 2058 - RNA, 21 nt, RNAi-antisense strand
ugcauaguuacauuagucguu

SEQ ID NO: 2059 - DNA, 21 bp, Homo sapiens
aatgtaactatgcagagttgt

SEQ ID NO: 2060 - RNA, 21 nt, RNAi-sense strand
uguaacuaugcagaguuguuu

SEQ ID NO: 2061 - RNA, 21 nt, RNAi-antisense strand
acaacucugcauaguuacauu

SEQ ID NO: 2062 - DNA, 21 bp, Homo sapiens
aactatgcagagttgtttgga

SEQ ID NO: 2063 - RNA, 21 nt, RNAi-sense strand
cuaugcagaguuguuuggauu

SEQ ID NO: 2064 - RNA, 21 nt, RNAi-antisense strand
uccaaacaacucugcauaguu

SEQ ID NO: 2065 - DNA, 21 bp, Homo sapiens
aagaatcaatctgtgtgagtc

SEQ ID NO: 2066 - RNA, 21 nt, RNAi-sense strand
gaaucaaucugugugagucuu

SEQ ID NO: 2067 - RNA, 21 nt, RNAi-antisense strand
gacucacacagauugauucuu

SEQ ID NO: 2068 - DNA, 21 bp, Homo sapiens
aatcaatctgtgtgagtctgt

SEQ ID NO: 2069 - RNA, 21 nt, RNAi-sense strand
ucaaucugugugagucuguuu

SEQ ID NO: 2070 - RNA, 21 nt, RNAi-antisense strand
acagacucacacagauugauu

SEQ ID NO: 2071 - DNA, 21 bp, Homo sapiens
cactccagcggcgactttgag

SEQ ID NO: 2072 - RNA, 21 nt, RNAi-sense strand
cuccagcggcgacuuugaguu

SEQ ID NO: 2073 - RNA, 21 nt, RNAi-antisense strand
cucaaagucgccgcuggaguu

SEQ ID NO: 2074 - DNA, 21 bp, Homo sapiens
cactgcgagtatggatctcca

SEQ ID NO: 2075 - RNA, 21 nt, RNAi-sense strand
cugcgaguauggaucuccauu

SEQ ID NO: 2076 - RNA, 21 nt, RNAi-antisense strand
uggagauccauacucgcaguu

SEQ ID NO: 2077 - DNA, 21 bp, Homo sapiens
cagcatcgacagacttcgagt

SEQ ID NO: 2078 - RNA, 21 nt, RNAi-sense strand
gcaucgacagacuucgaguuu

SEQ ID NO: 2079 - RNA, 21 nt, RNAi-antisense strand
acucgaagucugucgaugcuu

SEQ ID NO: 2080 - DNA, 21 bp, Homo sapiens
catcgacagacttcgagttct

SEQ ID NO: 2081 - RNA, 21 nt, RNAi-sense strand
ucgacagacuucgaguucuuu

SEQ ID NO: 2082 - RNA, 21 nt, RNAi-antisense strand
agaacucgaagucugucgauu

SEQ ID NO: 2083 - DNA, 21 bp, Homo sapiens
cagacttcgagttctcctgat

SEQ ID NO: 2084 - RNA, 21 nt, RNAi-sense strand
gacuucgaguucuccugauuu

SEQ ID NO: 2085 - RNA, 21 nt, RNAi-antisense strand
aucaggagaacucgaagucuu

SEQ ID NO: 2086 - DNA, 21 bp, Homo sapiens
catacaatggctcaaatcatg

SEQ ID NO: 2087 - RNA, 21 nt, RNAi-sense strand
uacaauggcucaaaucauguu

SEQ ID NO: 2088 - RNA, 21 nt, RNAi-antisense strand
caugauuugagccauuguauu

SEQ ID NO: 2089 - DNA, 21 bp, Homo sapiens
caatggctcaaatcatggcag

SEQ ID NO: 2090 - RNA, 21 nt, RNAi-sense strand
auggcucaaaucauggcaguu

SEQ ID NO: 2091 - RNA, 21 nt, RNAi-antisense strand
cugccaugauuugagccauuu

SEQ ID NO: 2092 - DNA, 21 bp, Homo sapiens
caaatcatggcagaacaagaa

SEQ ID NO: 2093 - RNA, 21 nt, RNAi-sense strand
aaucauggcagaacaagaauu

SEQ ID NO: 2094 - RNA, 21 nt, RNAi-antisense strand
uucuuguucugccaugauuuu

SEQ ID NO: 2095 - DNA, 21 bp, Homo sapiens
catggcagaacaagaagtgga

SEQ ID NO: 2096 - RNA, 21 nt, RNAi-sense strand
uggcagaacaagaaguggauu

SEQ ID NO: 2097 - RNA, 21 nt, RNAi-antisense strand
uccacuucuuguucugccauu

SEQ ID NO: 2098 - DNA, 21 bp, Homo sapiens
catggcagagtttgcagccaa

SEQ ID NO: 2099 - RNA, 21 nt, RNAi-sense strand
uggcagaguuugcagccaauu

SEQ ID NO: 2100 - RNA, 21 nt, RNAi-antisense strand
uuggcugcaaacucugccauu

SEQ ID NO: 2101 - DNA, 21 bp, Homo sapiens
cagagtttgcagccaaattta

SEQ ID NO: 2102 - RNA, 21 nt, RNAi-sense strand
gaguuugcagccaaauuuauu

SEQ ID NO: 2103 - RNA, 21 nt, RNAi-antisense strand
uaaauuuggcugcaaacucuu

SEQ ID NO: 2104 - DNA, 21 bp, Homo sapiens
cagccaaatttattgtacctt

SEQ ID NO: 2105 - RNA, 21 nt, RNAi-sense strand
gccaaauuuauuguaccuuuu

SEQ ID NO: 2106 - RNA, 21 nt, RNAi-antisense strand
aagguacaauaaauuuggcuu

SEQ ID NO: 2107 - DNA, 21 bp, Homo sapiens
cagcaactacgtagatctgat

SEQ ID NO: 2108 - RNA, 21 nt, RNAi-sense strand
gcaacuacguagaucugauuu

SEQ ID NO: 2109 - RNA, 21 nt, RNAi-antisense strand
aucagaucuacguaguugcuu

SEQ ID NO: 2110 - DNA, 21 bp, Homo sapiens
caactacgtagatctgatcac

SEQ ID NO: 2111 - RNA, 21 nt, RNAi-sense strand
acuacguagaucugaucacuu

SEQ ID NO: 2112 - RNA, 21 nt, RNAi-antisense strand
gugaucagaucuacguaguuu

SEQ ID NO: 2113 - DNA, 21 bp, Homo sapiens
cacagaacaggccgatatcgc

SEQ ID NO: 2114 - RNA, 21 nt, RNAi-sense strand
cagaacaggccgauaucgcuu

SEQ ID NO: 2115 - RNA, 21 nt, RNAi-antisense strand
gcgauaucggccuguucuguu

SEQ ID NO: 2116 - DNA, 21 bp, Homo sapiens
cagaacaggccgatatcgcat

SEQ ID NO: 2117 - RNA, 21 nt, RNAi-sense strand
gaacaggccgauaucgcauuu

SEQ ID NO: 2118 - RNA, 21 nt, RNAi-antisense strand
augcgauaucggccuguucuu

SEQ ID NO: 2119 - DNA, 21 bp, Homo sapiens
caggccgatatcgcattgacc

SEQ ID NO: 2120 - RNA, 21 nt, RNAi-sense strand
ggccgauaucgcauugaccuu

SEQ ID NO: 2121 - RNA, 21 nt, RNAi-antisense strand
ggucaaugcgauaucggccuu

SEQ ID NO: 2122 - DNA, 21 bp, Homo sapiens
cacagccagtcggagctgcaa

SEQ ID NO: 2123 - RNA, 21 nt, RNAi-sense strand
cagccagucggagcugcaauu

SEQ ID NO: 2124 - RNA, 21 nt, RNAi-antisense strand
uugcagcuccgacuggcuguu

SEQ ID NO: 2125 - DNA, 21 bp, Homo sapiens
cagccagtcggagctgcaagt

SEQ ID NO: 2126 - RNA, 21 nt, RNAi-sense strand
gccagucggagcugcaaguuu

SEQ ID NO: 2127 - RNA, 21 nt, RNAi-antisense strand
acuugcagcuccgacuggcuu

SEQ ID NO: 2128 - DNA, 21 bp, Homo sapiens
cagtcggagctgcaagtgttc

SEQ ID NO: 2129 - RNA, 21 nt, RNAi-sense strand
gucggagcugcaaguguucuu

SEQ ID NO: 2130 - RNA, 21 nt, RNAi-antisense strand
gaacacuugcagcuccgacuu

SEQ ID NO: 2131 - DNA, 21 bp, Homo sapiens
caaagtgcagtttgtctacga

SEQ ID NO: 2132 - RNA, 21 nt, RNAi-sense strand
aagugcaguuugucuacgauu

SEQ ID NO: 2133 - RNA, 21 nt, RNAi-antisense strand
ucguagacaaacugcacuuuu

SEQ ID NO: 2134 - DNA, 21 bp, Homo sapiens
cagtttgtctacgactcctcg

SEQ ID NO: 2135 - RNA, 21 nt, RNAi-sense strand
guuugucuacgacuccucguu

SEQ ID NO: 2136 - RNA, 21 nt, RNAi-antisense strand
cgaggagucguagacaaacuu

SEQ ID NO: 2137 - DNA, 21 bp, Homo sapiens
cacttcaaagacgcagtcagt

SEQ ID NO: 2138 - RNA, 21 nt, RNAi-sense strand
cuucaaagacgcagucaguuu

SEQ ID NO: 2139 - RNA, 21 nt, RNAi-antisense strand
acugacugcgucuuugaaguu

SEQ ID NO: 2140 - DNA, 21 bp, Homo sapiens
caaagacgcagtcagtgctgg

SEQ ID NO: 2141 - RNA, 21 nt, RNAi-sense strand
aagacgcagucagugcugguu

SEQ ID NO: 2142 - RNA, 21 nt, RNAi-antisense strand
ccagcacugacugcgucuuuu

SEQ ID NO: 2143 - DNA, 21 bp, Homo sapiens
cacacagccaactcgcaccac

SEQ ID NO: 2144 - RNA, 21 nt, RNAi-sense strand
cacagccaacucgcaccacuu

SEQ ID NO: 2145 - RNA, 21 nt, RNAi-antisense strand
guggugcgaguuggcuguguu

SEQ ID NO: 2146 - DNA, 21 bp, Homo sapiens
cacagccaactcgcaccacct

SEQ ID NO: 2147 - RNA, 21 nt, RNAi-sense strand
cagccaacucgcaccaccuuu

SEQ ID NO: 2148 - RNA, 21 nt, RNAi-antisense strand
agguggugcgaguuggcuguu

SEQ ID NO: 2149 - DNA, 21 bp, Homo sapiens
cagccaactcgcaccacctct

SEQ ID NO: 2150 - RNA, 21 nt, RNAi-sense strand
gccaacucgcaccaccucuuu

SEQ ID NO: 2151 - RNA, 21 nt, RNAi-antisense strand
agagguggugcgaguuggcuu

SEQ ID NO: 2152 - DNA, 21 bp, Homo sapiens
caactcgcaccacctctctgc

SEQ ID NO: 2153 - RNA, 21 nt, RNAi-sense strand
acucgcaccaccucucugcuu

SEQ ID NO: 2154 - RNA, 21 nt, RNAi-antisense strand
gcagagagguggugcgaguuu

SEQ ID NO: 2155 - DNA, 21 bp, Homo sapiens
caccacctctctgccttggtc

SEQ ID NO: 2156 - RNA, 21 nt, RNAi-sense strand
ccaccucucugccuuggucuu

SEQ ID NO: 2157 - RNA, 21 nt, RNAi-antisense strand
gaccaaggcagagaggugguu

SEQ ID NO: 2158 - DNA, 21 bp, Homo sapiens
cacctctctgccttggtcacc

SEQ ID NO: 2159 - RNA, 21 nt, RNAi-sense strand
ccucucugccuuggucaccuu

SEQ ID NO: 2160 - RNA, 21 nt, RNAi-antisense strand
ggugaccaaggcagagagguu

SEQ ID NO: 2161 - DNA, 21 bp, Homo sapiens
caagctcaacaaaccatttca

SEQ ID NO: 2162 - RNA, 21 nt, RNAi-sense strand
agcucaacaaaccauuucauu

SEQ ID NO: 2163 - RNA, 21 nt, RNAi-antisense strand
ugaaaugguuuguugagcuuu

SEQ ID NO: 2164 - DNA, 21 bp, Homo sapiens
caacaaaccatttcactggcc

SEQ ID NO: 2165 - RNA, 21 nt, RNAi-sense strand
acaaaccauuucacuggccuu

SEQ ID NO: 2166 - RNA, 21 nt, RNAi-antisense strand
ggccagugaaaugguuuguuu

SEQ ID NO: 2167 - DNA, 21 bp, Homo sapiens
caaaccatttcactggcctct

SEQ ID NO: 2168 - RNA, 21 nt, RNAi-sense strand
aaccauuucacuggccucuuu

SEQ ID NO: 2169 - RNA, 21 nt, RNAi-antisense strand
agaggccagugaaaugguuuu

SEQ ID NO: 2170 - DNA, 21 bp, Homo sapiens
catttcactggcctctagtga

SEQ ID NO: 2171 - RNA, 21 nt, RNAi-sense strand
uuucacuggccucuagugauu

SEQ ID NO: 2172 - RNA, 21 nt, RNAi-antisense strand
ucacuagaggccagugaaauu

SEQ ID NO: 2173 - DNA, 21 bp, Homo sapiens
cactggcctctagtgatccgc

SEQ ID NO: 2174 - RNA, 21 nt, RNAi-sense strand
cuggccucuagugauccgcuu

SEQ ID NO: 2175 - RNA, 21 nt, RNAi-antisense strand
gcggaucacuagaggccaguu

SEQ ID NO: 2176 - DNA, 21 bp, Homo sapiens
cagaagacggtcaccatgatc

SEQ ID NO: 2177 - RNA, 21 nt, RNAi-sense strand
gaagacggucaccaugaucuu

SEQ ID NO: 2178 - RNA, 21 nt, RNAi-antisense strand
gaucauggugaccgucuucuu

SEQ ID NO: 2179 - DNA, 21 bp, Homo sapiens
caccatgatcctgtctgcggt

SEQ ID NO: 2180 - RNA, 21 nt, RNAi-sense strand
ccaugauccugucugcgguuu

SEQ ID NO: 2181 - RNA, 21 nt, RNAi-antisense strand
accgcagacaggaucaugguu

SEQ ID NO: 2182 - DNA, 21 bp, Homo sapiens
catgatcctgtctgcggtcca

SEQ ID NO: 2183 - RNA, 21 nt, RNAi-sense strand
ugauccugucugcgguccauu

SEQ ID NO: 2184 - RNA, 21 nt, RNAi-antisense strand
uggaccgcagacaggaucauu

SEQ ID NO: 2185 - DNA, 21 bp, Homo sapiens
catcatggtaacactcgcgat

SEQ ID NO: 2186 - RNA, 21 nt, RNAi-sense strand
ucaugguaacacucgcgauuu

SEQ ID NO: 2187 - RNA, 21 nt, RNAi-antisense strand
aucgcgaguguuaccaugauu

SEQ ID NO: 2188 - DNA, 21 bp, Homo sapiens
catggtaacactcgcgattta

SEQ ID NO: 2189 - RNA, 21 nt, RNAi-sense strand
ugguaacacucgcgauuuauu

SEQ ID NO: 2190 - RNA, 21 nt, RNAi-antisense strand
uaaaucgcgaguguuaccauu

SEQ ID NO: 2191 - DNA, 21 bp, Homo sapiens
cactcgcgatttaccacgtcc

SEQ ID NO: 2192 - RNA, 21 nt, RNAi-sense strand
cucgcgauuuaccacguccuu

SEQ ID NO: 2193 - RNA, 21 nt, RNAi-antisense strand
ggacgugguaaaucgcgaguu

SEQ ID NO: 2194 - DNA, 21 bp, Homo sapiens
caactggatcaggtagaacaa

SEQ ID NO: 2195 - RNA, 21 nt, RNAi-sense strand
acuggaucagguagaacaauu

SEQ ID NO: 2196 - RNA, 21 nt, RNAi-antisense strand
uuguucuaccugauccaguuu

SEQ ID NO: 2197 - DNA, 21 bp, Homo sapiens
catcttgtacacgagatacac

SEQ ID NO: 2198 - RNA, 21 nt, RNAi-sense strand
ucuuguacacgagauacacuu

SEQ ID NO: 2199 - RNA, 21 nt, RNAi-antisense strand
guguaucucguguacaagauu

SEQ ID NO: 2200 - DNA, 21 bp, Homo sapiens
cacgagatacaccaacatagc

SEQ ID NO: 2201 - RNA, 21 nt, RNAi-sense strand
cgagauacaccaacauagcuu

SEQ ID NO: 2202 - RNA, 21 nt, RNAi-antisense strand
gcuauguugguguaucucguu

SEQ ID NO: 2203 - DNA, 21 bp, Homo sapiens
caccaacatagctacaatcaa

SEQ ID NO: 2204 - RNA, 21 nt, RNAi-sense strand
ccaacauagcuacaaucaauu

SEQ ID NO: 2205 - RNA, 21 nt, RNAi-antisense strand
uugauuguagcuauguugguu

SEQ ID NO: 2206 - DNA, 21 bp, Homo sapiens
caacatagctacaatcaaaca

SEQ ID NO: 2207 - RNA, 21 nt, RNAi-sense strand
acauagcuacaaucaaacauu

SEQ ID NO: 2208 - RNA, 21 nt, RNAi-antisense strand
uguuugauuguagcuauguuu

SEQ ID NO: 2209 - DNA, 21 bp, Homo sapiens
catagctacaatcaaacaggc

SEQ ID NO: 2210 - RNA, 21 nt, RNAi-sense strand
uagcuacaaucaaacaggcuu

SEQ ID NO: 2211 - RNA, 21 nt, RNAi-antisense strand
gccuguuugauuguagcuauu

SEQ ID NO: 2212 - DNA, 21 bp, Homo sapiens
caattattctctccatgctgg

SEQ ID NO: 2213 - RNA, 21 nt, RNAi-sense strand
auuauucucuccaugcugguu

SEQ ID NO: 2214 - RNA, 21 nt, RNAi-antisense strand
ccagcauggagagaauaauuu

SEQ ID NO: 2215 - DNA, 21 bp, Homo sapiens
cagacagctttcgtgctcatg

SEQ ID NO: 2216 - RNA, 21 nt, RNAi-sense strand
gacagcuuucgugcucauguu

SEQ ID NO: 2217 - RNA, 21 nt, RNAi-antisense strand
caugagcacgaaagcugucuu

SEQ ID NO: 2218 - DNA, 21 bp, Homo sapiens
cagctttcgtgctcatggtgg

SEQ ID NO: 2219 - RNA, 21 nt, RNAi-sense strand
gcuuucgugcucauggugguu

SEQ ID NO: 2220 - RNA, 21 nt, RNAi-antisense strand
ccaccaugagcacgaaagcuu

SEQ ID NO: 2221 - DNA, 21 bp, Homo sapiens
catggtggcttggctttgact

SEQ ID NO: 2222 - RNA, 21 nt, RNAi-sense strand
ugguggcuuggcuuugacuuu

SEQ ID NO: 2223 - RNA, 21 nt, RNAi-antisense strand
agucaaagccaagccaccauu

SEQ ID NO: 2224 - DNA, 21 bp, Homo sapiens
caaagagcaataaatgccact

SEQ ID NO: 2225 - RNA, 21 nt, RNAi-sense strand
aagagcaauaaaugccacuuu

SEQ ID NO: 2226 - RNA, 21 nt, RNAi-antisense strand
aguggcauuuauugcucuuuu

SEQ ID NO: 2227 - DNA, 21 bp, Homo sapiens
caataaatgccacttggagct

SEQ ID NO: 2228 - RNA, 21 nt, RNAi-sense strand
auaaaugccacuuggagcuuu

SEQ ID NO: 2229 - RNA, 21 nt, RNAi-antisense strand
agcuccaaguggcauuuauuu

SEQ ID NO: 2230 - DNA, 21 bp, Homo sapiens
cacttggagctgtatctggcc

SEQ ID NO: 2231 - RNA, 21 nt, RNAi-sense strand
cuuggagcuguaucuggccuu

SEQ ID NO: 2232 - RNA, 21 nt, RNAi-antisense strand
ggccagauacagcuccaaguu

SEQ ID NO: 2233 - DNA, 21 bp, Homo sapiens
catgcttctttgaggaggaaa

SEQ ID NO: 2234 - RNA, 21 nt, RNAi-sense strand
ugcuucuuugaggaggaaauu

SEQ ID NO: 2235 - RNA, 21 nt, RNAi-antisense strand
uuuccuccucaaagaagcauu

SEQ ID NO: 2236 - DNA, 21 bp, Homo sapiens
cacagctggcttatcctatac

SEQ ID NO: 2237 - RNA, 21 nt, RNAi-sense strand
cagcuggcuuauccuauacuu

SEQ ID NO: 2238 - RNA, 21 nt, RNAi-antisense strand
guauaggauaagccagcuguu

SEQ ID NO: 2239 - DNA, 21 bp, Homo sapiens
cagctggcttatcctatacag

SEQ ID NO: 2240 - RNA, 21 nt, RNAi-sense strand
gcuggcuuauccuauacaguu

SEQ ID NO: 2241 - RNA, 21 nt, RNAi-antisense strand
cuguauaggauaagccagcuu

SEQ ID NO: 2242 - DNA, 21 bp, Homo sapiens
cagttgtcaatgcacacagaa

SEQ ID NO: 2243 - RNA, 21 nt, RNAi-sense strand
guugucaaugcacacagaauu

SEQ ID NO: 2244 - RNA, 21 nt, RNAi-antisense strand
uucugugugcauugacaacuu

SEQ ID NO: 2245 - DNA, 21 bp, Homo sapiens
caatgcacacagaatacaacc

SEQ ID NO: 2246 - RNA, 21 nt, RNAi-sense strand
augcacacagaauacaaccuu

SEQ ID NO: 2247 - RNA, 21 nt, RNAi-antisense strand
gguuguauucugugugcauuu

SEQ ID NO: 2248 - DNA, 21 bp, Homo sapiens
cacacagaatacaacctcatg

SEQ ID NO: 2249 - RNA, 21 nt, RNAi-sense strand
cacagaauacaaccucauguu

SEQ ID NO: 2250 - RNA, 21 nt, RNAi-antisense strand
caugagguuguauucuguguu

SEQ ID NO: 2251 - DNA, 21 bp, Homo sapiens
cacagaatacaacctcatgct

SEQ ID NO: 2252 - RNA, 21 nt, RNAi-sense strand
cagaauacaaccucaugcuuu

SEQ ID NO: 2253 - RNA, 21 nt, RNAi-antisense strand
agcaugagguuguauucuguu

SEQ ID NO: 2254 - DNA, 21 bp, Homo sapiens
cagaatacaacctcatgctcc

SEQ ID NO: 2255 - RNA, 21 nt, RNAi-sense strand
gaauacaaccucaugcuccuu

SEQ ID NO: 2256 - RNA, 21 nt, RNAi-antisense strand
ggagcaugagguuguauucuu

SEQ ID NO: 2257 - DNA, 21 bp, Homo sapiens
catgcttctggctggcattct

SEQ ID NO: 2258 - RNA, 21 nt, RNAi-sense strand
ugcuucuggcuggcauucuuu

SEQ ID NO: 2259 - RNA, 21 nt, RNAi-antisense strand
agaaugccagccagaagcauu

SEQ ID NO: 2260 - DNA, 21 bp, Homo sapiens
cattctgcatgtttagtgatt

SEQ ID NO: 2261 - RNA, 21 nt, RNAi-sense strand
uucugcauguuuagugauuuu

SEQ ID NO: 2262 - RNA, 21 nt, RNAi-antisense strand
aaucacuaaacaugcagaauu

SEQ ID NO: 2263 - DNA, 21 bp, Homo sapiens
catgtttagtgattgtcttgg

SEQ ID NO: 2264 - RNA, 21 nt, RNAi-sense strand
uguuuagugauugucuugguu

SEQ ID NO: 2265 - RNA, 21 nt, RNAi-antisense strand
ccaagacaaucacuaaacauu

SEQ ID NO: 2266 - DNA, 21 bp, Homo sapiens
catccagcgactgcagcacca

SEQ ID NO: 2267 - RNA, 21 nt, RNAi-sense strand
uccagcgacugcagcaccauu

SEQ ID NO: 2268 - RNA, 21 nt, RNAi-antisense strand
uggugcugcagucgcuggauu

SEQ ID NO: 2269 - DNA, 21 bp, Homo sapiens
cagcgactgcagcaccagaaa

SEQ ID NO: 2270 - RNA, 21 nt, RNAi-sense strand
gcgacugcagcaccagaaauu

SEQ ID NO: 2271 - RNA, 21 nt, RNAi-antisense strand
uuucuggugcugcagucgcuu

SEQ ID NO: 2272 - DNA, 21 bp, Homo sapiens
cagagttgtttggacttcttc

SEQ ID NO: 2273 - RNA, 21 nt, RNAi-sense strand
gaguuguuuggacuucuucuu

SEQ ID NO: 2274 - RNA, 21 nt, RNAi-antisense strand
gaagaaguccaaacaacucuu

SEQ ID NO: 2275 - DNA, 21 bp, Homo sapiens
gatttgctctgccagcagctg

SEQ ID NO: 2276 - RNA, 21 nt, RNAi-sense strand
uuugcucugccagcagcuguu

SEQ ID NO: 2277 - RNA, 21 nt, RNAi-antisense strand
cagcugcuggcagagcaaauu

SEQ ID NO: 2278 - DNA, 21 bp, Homo sapiens
gacaccgagtcctagctaggc

SEQ ID NO: 2279 - RNA, 21 nt, RNAi-sense strand
caccgaguccuagcuaggcuu

SEQ ID NO: 2280 - RNA, 21 nt, RNAi-antisense strand
gccuagcuaggacucgguguu

SEQ ID NO: 2281 - DNA, 21 bp, Homo sapiens
gagtcctagctaggcgctcac

SEQ ID NO: 2282 - RNA, 21 nt, RNAi-sense strand
guccuagcuaggcgcucacuu

SEQ ID NO: 2283 - RNA, 21 nt, RNAi-antisense strand
gugagcgccuagcuaggacuu

SEQ ID NO: 2284 - DNA, 21 bp, Homo sapiens
gagtatggatctccaaggaag

SEQ ID NO: 2285 - RNA, 21 nt, RNAi-sense strand
guauggaucuccaaggaaguu

SEQ ID NO: 2286 - RNA, 21 nt, RNAi-antisense strand
cuuccuuggagauccauacuu

SEQ ID NO: 2287 - DNA, 21 bp, Homo sapiens
gacagacttcgagttctcctg

SEQ ID NO: 2288 - RNA, 21 nt, RNAi-sense strand
cagacuucgaguucuccuguu

SEQ ID NO: 2289 - RNA, 21 nt, RNAi-antisense strand
caggagaacucgaagucuguu

SEQ ID NO: 2290 - DNA, 21 bp, Homo sapiens
gacttcgagttctcctgatgt

SEQ ID NO: 2291 - RNA, 21 nt, RNAi-sense strand
cuucgaguucuccugauguuu

SEQ ID NO: 2292 - RNA, 21 nt, RNAi-antisense strand
acaucaggagaacucgaaguu

SEQ ID NO: 2293 - DNA, 21 bp, Homo sapiens
gagttctcctgatgttgttcc

SEQ ID NO: 2294 - RNA, 21 nt, RNAi-sense strand
guucuccugauguuguuccuu

SEQ ID NO: 2295 - RNA, 21 nt, RNAi-antisense strand
ggaacaacaucaggagaacuu

SEQ ID NO: 2296 - DNA, 21 bp, Homo sapiens
gatgttgttccatacaatggc

SEQ ID NO: 2297 - RNA, 21 nt, RNAi-sense strand
uguuguuccauacaauggcuu

SEQ ID NO: 2298 - RNA, 21 nt, RNAi-antisense strand
gccauuguauggaacaacauu

SEQ ID NO: 2299 - DNA, 21 bp, Homo sapiens
gacgacgtgtctcatggcaga

SEQ ID NO: 2300 - RNA, 21 nt, RNAi-sense strand
cgacgugucucauggcagauu

SEQ ID NO: 2301 - RNA, 21 nt, RNAi-antisense strand
ucugccaugagacacgucguu

SEQ ID NO: 2302 - DNA, 21 bp, Homo sapiens
gacgtgtctcatggcagagtt

SEQ ID NO: 2303 - RNA, 21 nt, RNAi-sense strand
cgugucucauggcagaguuuu

SEQ ID NO: 2304 - RNA, 21 nt, RNAi-antisense strand
aacucugccaugagacacguu

SEQ ID NO: 2305 - DNA, 21 bp, Homo sapiens
gagtttgcagccaaatttatt

SEQ ID NO: 2306 - RNA, 21 nt, RNAi-sense strand
guuugcagccaaauuuauuuu

SEQ ID NO: 2307 - RNA, 21 nt, RNAi-antisense strand
aauaaauuuggcugcaaacuu

SEQ ID NO: 2308 - DNA, 21 bp, Homo sapiens
gatctgatcacagaacaggcc

SEQ ID NO: 2309 - RNA, 21 nt, RNAi-sense strand
ucugaucacagaacaggccuu

SEQ ID NO: 2310 - RNA, 21 nt, RNAi-antisense strand
ggccuguucugugaucagauu

SEQ ID NO: 2311 - DNA, 21 bp, Homo sapiens
gatcacagaacaggccgatat

SEQ ID NO: 2312 - RNA, 21 nt, RNAi-sense strand
ucacagaacaggccgauauuu

SEQ ID NO: 2313 - RNA, 21 nt, RNAi-antisense strand
auaucggccuguucugugauu

SEQ ID NO: 2314 - DNA, 21 bp, Homo sapiens
gaacaggccgatatcgcattg

SEQ ID NO: 2315 - RNA, 21 nt, RNAi-sense strand
acaggccgauaucgcauuguu

SEQ ID NO: 2316 - RNA, 21 nt, RNAi-antisense strand
caaugcgauaucggccuguuu

SEQ ID NO: 2317 - DNA, 21 bp, Homo sapiens
gatcgcgcatatgcactcaaa

SEQ ID NO: 2318 - RNA, 21 nt, RNAi-sense strand
ucgcgcauaugcacucaaauu

SEQ ID NO: 2319 - RNA, 21 nt, RNAi-antisense strand
uuugagugcauaugcgcgauu

SEQ ID NO: 2320 - DNA, 21 bp, Homo sapiens
gaaagccacaacatgtccaag

SEQ ID NO: 2321 - RNA, 21 nt, RNAi-sense strand
aagccacaacauguccaaguu

SEQ ID NO: 2322 - RNA, 21 nt, RNAi-antisense strand
cuuggacauguuguggcuuuu

SEQ ID NO: 2323 - DNA, 21 bp, Homo sapiens
gacttggaggctgagcaaagt

SEQ ID NO: 2324 - RNA, 21 nt, RNAi-sense strand
cuuggaggcugagcaaaguuu

SEQ ID NO: 2325 - RNA, 21 nt, RNAi-antisense strand
acuuugcucagccuccaaguu

SEQ ID NO: 2326 - DNA, 21 bp, Homo sapiens
gaggctgagcaaagtgcagtt

SEQ ID NO: 2327 - RNA, 21 nt, RNAi-sense strand
ggcugagcaaagugcaguuuu

SEQ ID NO: 2328 - RNA, 21 nt, RNAi-antisense strand
aacugcacuuugcucagccuu

SEQ ID NO: 2329 - DNA, 21 bp, Homo sapiens
gagcaaagtgcagtttgtcta

SEQ ID NO: 2330 - RNA, 21 nt, RNAi-sense strand
gcaaagugcaguuugucuauu

SEQ ID NO: 2331 - RNA, 21 nt, RNAi-antisense strand
uagacaaacugcacuuugcuu

SEQ ID NO: 2332 - DNA, 21 bp, Homo sapiens
gaagcacacagccaactcgca

SEQ ID NO: 2333 - RNA, 21 nt, RNAi-sense strand
agcacacagccaacucgcauu

SEQ ID NO: 2334 - RNA, 21 nt, RNAi-antisense strand
ugcgaguuggcugugugcuuu

SEQ ID NO: 2335 - DNA, 21 bp, Homo sapiens
gaagtcctatgagtgtcaagc

SEQ ID NO: 2336 - RNA, 21 nt, RNAi-sense strand
aguccuaugagugucaagcuu

SEQ ID NO: 2337 - RNA, 21 nt, RNAi-antisense strand
gcuugacacucauaggacuuu

SEQ ID NO: 2338 - DNA, 21 bp, Homo sapiens
gagtgtcaagctcaacaaacc

SEQ ID NO: 2339 - RNA, 21 nt, RNAi-sense strand
gugucaagcucaacaaaccuu

SEQ ID NO: 2340 - RNA, 21 nt, RNAi-antisense strand
gguuuguugagcuugacacuu

SEQ ID NO: 2341 - DNA, 21 bp, Homo sapiens
gatccgcagaagacggtcacc

SEQ ID NO: 2342 - RNA, 21 nt, RNAi-sense strand
uccgcagaagacggucaccuu

SEQ ID NO: 2343 - RNA, 21 nt, RNAi-antisense strand
ggugaccgucuucugcggauu

SEQ ID NO: 2344 - DNA, 21 bp, Homo sapiens
gaagacggtcaccatgatcct

SEQ ID NO: 2345 - RNA, 21 nt, RNAi-sense strand
agacggucaccaugauccuuu

SEQ ID NO: 2346 - RNA, 21 nt, RNAi-antisense strand
aggaucauggugaccgucuuu

SEQ ID NO: 2347 - DNA, 21 bp, Homo sapiens
gacggtcaccatgatcctgtc

SEQ ID NO: 2348 - RNA, 21 nt, RNAi-sense strand
cggucaccaugauccugucuu

SEQ ID NO: 2349 - RNA, 21 nt, RNAi-antisense strand
gacaggaucauggugaccguu

SEQ ID NO: 2350 - DNA, 21 bp, Homo sapiens
gatcctgtctgcggtccacat

SEQ ID NO: 2351 - RNA, 21 nt, RNAi-sense strand
uccugucugcgguccacauuu

SEQ ID NO: 2352 - RNA, 21 nt, RNAi-antisense strand
auguggaccgcagacaggauu

SEQ ID NO: 2353 - DNA, 21 bp, Homo sapiens
gagcaactggaagaaaccttg

SEQ ID NO: 2354 - RNA, 21 nt, RNAi-sense strand
gcaacuggaagaaaccuuguu

SEQ ID NO: 2355 - RNA, 21 nt, RNAi-antisense strand
caagguuucuuccaguugcuu

SEQ ID NO: 2356 - DNA, 21 bp, Homo sapiens
gatttaccacgtccaccacaa

SEQ ID NO: 2357 - RNA, 21 nt, RNAi-sense strand
uuuaccacguccaccacaauu

SEQ ID NO: 2358 - RNA, 21 nt, RNAi-antisense strand
uugugguggacgugguaaauu

SEQ ID NO: 2359 - DNA, 21 bp, Homo sapiens
gactgccaaccaggtgcagat

SEQ ID NO: 2360 - RNA, 21 nt, RNAi-sense strand
cugccaaccaggugcagauuu

SEQ ID NO: 2361 - RNA, 21 nt, RNAi-antisense strand
aucugcaccugguuggcaguu

SEQ ID NO: 2362 - DNA, 21 bp, Homo sapiens
gagatacaccaacatagctac

SEQ ID NO: 2363 - RNA, 21 nt, RNAi-sense strand
gauacaccaacauagcuacuu

SEQ ID NO: 2364 - RNA, 21 nt, RNAi-antisense strand
guagcuauguugguguaucuu

SEQ ID NO: 2365 - DNA, 21 bp, Homo sapiens
gatacaccaacatagctacaa

SEQ ID NO: 2366 - RNA, 21 nt, RNAi-sense strand
uacaccaacauagcuacaauu

SEQ ID NO: 2367 - RNA, 21 nt, RNAi-antisense strand
uuguagcuauguugguguauu

SEQ ID NO: 2368 - DNA, 21 bp, Homo sapiens
gaggcttgcttggcttgtgtc

SEQ ID NO: 2369 - RNA, 21 nt, RNAi-sense strand
ggcuugcuuggcuugugucuu

SEQ ID NO: 2370 - RNA, 21 nt, RNAi-antisense strand
gacacaagccaagcaagccuu

SEQ ID NO: 2371 - DNA, 21 bp, Homo sapiens
gagactctttcggatttgtag

SEQ ID NO: 2372 - RNA, 21 nt, RNAi-sense strand
gacucuuucggauuuguaguu

SEQ ID NO: 2373 - RNA, 21 nt, RNAi-antisense strand
cuacaaauccgaaagagucuu

SEQ ID NO: 2374 - DNA, 21 bp, Homo sapiens
gaaatggcaattattctctcc

SEQ ID NO: 2375 - RNA, 21 nt, RNAi-sense strand
aauggcaauuauucucuccuu

SEQ ID NO: 2376 - RNA, 21 nt, RNAi-antisense strand
ggagagaauaauugccauuuu

SEQ ID NO: 2377 - DNA, 21 bp, Homo sapiens
gacagctttcgtgctcatggt

SEQ ID NO: 2378 - RNA, 21 nt, RNAi-sense strand
cagcuuucgugcucaugguuu

SEQ ID NO: 2379 - RNA, 21 nt, RNAi-antisense strand
accaugagcacgaaagcuguu

SEQ ID NO: 2380 - DNA, 21 bp, Homo sapiens
gactctccaaagagcaataaa

SEQ ID NO: 2381 - RNA, 21 nt, RNAi-sense strand
cucuccaaagagcaauaaauu

SEQ ID NO: 2382 - RNA, 21 nt, RNAi-antisense strand
uuuauugcucuuuggagaguu

SEQ ID NO: 2383 - DNA, 21 bp, Homo sapiens
gagcaataaatgccacttgga

SEQ ID NO: 2384 - RNA, 21 nt, RNAi-sense strand
gcaauaaaugccacuuggauu

SEQ ID NO: 2385 - RNA, 21 nt, RNAi-antisense strand
uccaaguggcauuuauugcuu

SEQ ID NO: 2386 - DNA, 21 bp, Homo sapiens
gacacagctggcttatcctat

SEQ ID NO: 2387 - RNA, 21 nt, RNAi-sense strand
cacagcuggcuuauccuauuu

SEQ ID NO: 2388 - RNA, 21 nt, RNAi-antisense strand
auaggauaagccagcuguguu

SEQ ID NO: 2389 - DNA, 21 bp, Homo sapiens
gaaagtgattcatgcttctgg

SEQ ID NO: 2390 - RNA, 21 nt, RNAi-sense strand
aagugauucaugcuucugguu

SEQ ID NO: 2391 - RNA, 21 nt, RNAi-antisense strand
ccagaagcaugaaucacuuuu

SEQ ID NO: 2392 - DNA, 21 bp, Homo sapiens
gattcatgcttctggctggca

SEQ ID NO: 2393 - RNA, 21 nt, RNAi-sense strand
uucaugcuucuggcuggcauu

SEQ ID NO: 2394 - RNA, 21 nt, RNAi-antisense strand
ugccagccagaagcaugaauu

SEQ ID NO: 2395 - DNA, 21 bp, Homo sapiens
gactaatgtaactatgcagag

SEQ ID NO: 2396 - RNA, 21 nt, RNAi-sense strand
cuaauguaacuaugcagaguu

SEQ ID NO: 2397 - RNA, 21 nt, RNAi-antisense strand
cucugcauaguuacauuaguu

SEQ ID NO: 2398 - DNA, 21 bp, Homo sapiens
gagttgtttggacttcttcct

SEQ ID NO: 2399 - RNA, 21 nt, RNAi-sense strand
guuguuuggacuucuuccuuu

SEQ ID NO: 2400 - RNA, 21 nt, RNAi-antisense strand
aggaagaaguccaaacaacuu

SEQ ID NO: 2401 - DNA, 21 bp, Homo sapiens
gacttcttcctgtgccaggtc

SEQ ID NO: 2402 - RNA, 21 nt, RNAi-sense strand
cuucuuccugugccaggucuu

SEQ ID NO: 2403 - RNA, 21 nt, RNAi-antisense strand
gaccuggcacaggaagaaguu

SEQ ID NO: 2404 - DNA, 21 bp, Homo sapiens
gacctgaagaatcaatctgtg

SEQ ID NO: 2405 - RNA, 21 nt, RNAi-sense strand
ccugaagaaucaaucuguguu

SEQ ID NO: 2406 - RNA, 21 nt, RNAi-antisense strand
cacagauugauucuucagguu

SEQ ID NO: 2407 - DNA, 21 bp, Homo sapiens
gaagaatcaatctgtgtgagt

SEQ ID NO: 2408 - RNA, 21 nt, RNAi-sense strand
agaaucaaucugugugaguuu

SEQ ID NO: 2409 - RNA, 21 nt, RNAi-antisense strand
acucacacagauugauucuuu

SEQ ID NO: 2410 - DNA, 21 bp, Homo sapiens
gaatcaatctgtgtgagtctg

SEQ ID NO: 2411 - RNA, 21 nt, RNAi-sense strand
aucaaucugugugagucuguu

SEQ ID NO: 2412 - RNA, 21 nt, RNAi-antisense strand
cagacucacacagauugauuu

SEQ ID NO: 2413 - DNA, 21 bp, Homo sapiens
tagctaggcgctcacagaata

SEQ ID NO: 2414 - RNA, 21 nt, RNAi-sense strand
gcuaggcgcucacagaauauu

SEQ ID NO: 2415 - RNA, 21 nt, RNAi-antisense strand
uauucugugagcgccuagcuu

SEQ ID NO: 2416 - DNA, 21 bp, Homo sapiens
taggcgctcacagaatacgcg

SEQ ID NO: 2417 - RNA, 21 nt, RNAi-sense strand
ggcgcucacagaauacgcguu

SEQ ID NO: 2418 - RNA, 21 nt, RNAi-antisense strand
cgcguauucugugagcgccuu

SEQ ID NO: 2419 - DNA, 21 bp, Homo sapiens
tatggatctccaaggaagagg

SEQ ID NO: 2420 - RNA, 21 nt, RNAi-sense strand
uggaucuccaaggaagagguu

SEQ ID NO: 2421 - RNA, 21 nt, RNAi-antisense strand
ccucuuccuuggagauccauu

SEQ ID NO: 2422 - DNA, 21 bp, Homo sapiens
tacaatggctcaaatcatggc

SEQ ID NO: 2423 - RNA, 21 nt, RNAi-sense strand
caauggcucaaaucauggcuu

SEQ ID NO: 2424 - RNA, 21 nt, RNAi-antisense strand
gccaugauuugagccauuguu

SEQ ID NO: 2425 - DNA, 21 bp, Homo sapiens
tattgtaccttatgatgtgtg

SEQ ID NO: 2426 - RNA, 21 nt, RNAi-sense strand
uuguaccuuaugauguguguu

SEQ ID NO: 2427 - RNA, 21 nt, RNAi-antisense strand
cacacaucauaagguacaauu

SEQ ID NO: 2428 - DNA, 21 bp, Homo sapiens
tacgtagatctgatcacagaa

SEQ ID NO: 2429 - RNA, 21 nt, RNAi-sense strand
cguagaucugaucacagaauu

SEQ ID NO: 2430 - RNA, 21 nt, RNAi-antisense strand
uucugugaucagaucuacguu

SEQ ID NO: 2431 - DNA, 21 bp, Homo sapiens
tagatctgatcacagaacagg

SEQ ID NO: 2432 - RNA, 21 nt, RNAi-sense strand
gaucugaucacagaacagguu

SEQ ID NO: 2433 - RNA, 21 nt, RNAi-antisense strand
ccuguucugugaucagaucuu

SEQ ID NO: 2434 - DNA, 21 bp, Homo sapiens
taaaggaaagccacaacatgt

SEQ ID NO: 2435 - RNA, 21 nt, RNAi-sense strand
aaggaaagccacaacauguuu

SEQ ID NO: 2436 - RNA, 21 nt, RNAi-antisense strand
acauguuguggcuuuccuuuu

SEQ ID NO: 2437 - DNA, 21 bp, Homo sapiens
tatgagtgtcaagctcaacaa

SEQ ID NO: 2438 - RNA, 21 nt, RNAi-sense strand
ugagugucaagcucaacaauu

SEQ ID NO: 2439 - RNA, 21 nt, RNAi-antisense strand
uuguugagcuugacacucauu

SEQ ID NO: 2440 - DNA, 21 bp, Homo sapiens
tagtgatccgcagaagacggt

SEQ ID NO: 2441 - RNA, 21 nt, RNAi-sense strand
gugauccgcagaagacgguuu

SEQ ID NO: 2442 - RNA, 21 nt, RNAi-antisense strand
accgucuucugcggaucacuu

SEQ ID NO: 2443 - DNA, 21 bp, Homo sapiens
taacactcgcgatttaccacg

SEQ ID NO: 2444 - RNA, 21 nt, RNAi-sense strand
acacucgcgauuuaccacguu

SEQ ID NO: 2445 - RNA, 21 nt, RNAi-antisense strand
cgugguaaaucgcgaguguuu

SEQ ID NO: 2446 - DNA, 21 bp, Homo sapiens
tagaggccgttaggcaggcac

SEQ ID NO: 2447 - RNA, 21 nt, RNAi-sense strand
gaggccguuaggcaggcacuu

SEQ ID NO: 2448 - RNA, 21 nt, RNAi-antisense strand
gugccugccuaacggccucuu

SEQ ID NO: 2449 - DNA, 21 bp, Homo sapiens
tacacgagatacaccaacata

SEQ ID NO: 2450 - RNA, 21 nt, RNAi-sense strand
cacgagauacaccaacauauu

SEQ ID NO: 2451 - RNA, 21 nt, RNAi-antisense strand
uauguugguguaucucguguu

SEQ ID NO: 2452 - DNA, 21 bp, Homo sapiens
tacaccaacatagctacaatc

SEQ ID NO: 2453 - RNA, 21 nt, RNAi-sense strand
caccaacauagcuacaaucuu

SEQ ID NO: 2454 - RNA, 21 nt, RNAi-antisense strand
gauuguagcuauguugguguu

SEQ ID NO: 2455 - DNA, 21 bp, Homo sapiens
tagctacaatcaaacaggcct

SEQ ID NO: 2456 - RNA, 21 nt, RNAi-sense strand
gcuacaaucaaacaggccuuu

SEQ ID NO: 2457 - RNA, 21 nt, RNAi-antisense strand
aggccuguuugauuguagcuu

SEQ ID NO: 2458 - DNA, 21 bp, Homo sapiens
tatctgaggcttgcttggctt

SEQ ID NO: 2459 - RNA, 21 nt, RNAi-sense strand
ucugaggcuugcuuggcuuuu

SEQ ID NO: 2460 - RNA, 21 nt, RNAi-antisense strand
aagccaagcaagccucagauu

SEQ ID NO: 2461 - DNA, 21 bp, Homo sapiens
taaatgccacttggagctgta

SEQ ID NO: 2462 - RNA, 21 nt, RNAi-sense strand
aaugccacuuggagcuguauu

SEQ ID NO: 2463 - RNA, 21 nt, RNAi-antisense strand
uacagcuccaaguggcauuuu

SEQ ID NO: 2464 - DNA, 21 bp, Homo sapiens
tatcctatacagttgtcaatg

SEQ ID NO: 2465 - RNA, 21 nt, RNAi-sense strand
uccuauacaguugucaauguu

SEQ ID NO: 2466 - RNA, 21 nt, RNAi-antisense strand
cauugacaacuguauaggauu

SEQ ID NO: 2467 - DNA, 21 bp, Homo sapiens
tatacagttgtcaatgcacac

SEQ ID NO: 2468 - RNA, 21 nt, RNAi-sense strand
uacaguugucaaugcacacuu

SEQ ID NO: 2469 - RNA, 21 nt, RNAi-antisense strand
gugugcauugacaacuguauu

SEQ ID NO: 2470 - DNA, 21 bp, Homo sapiens
tacagttgtcaatgcacacag

SEQ ID NO: 2471 - RNA, 21 nt, RNAi-sense strand
caguugucaaugcacacaguu

SEQ ID NO: 2472 - RNA, 21 nt, RNAi-antisense strand
cugugugcauugacaacuguu

SEQ ID NO: 2473 - DNA, 21 bp, Homo sapiens
taatgtaactatgcagagttg

SEQ ID NO: 2474 - RNA, 21 nt, RNAi-sense strand
auguaacuaugcagaguuguu

SEQ ID NO: 2475 - RNA, 21 nt, RNAi-antisense strand
caacucugcauaguuacauuu

SEQ ID NO: 2476 - DNA, 21 bp, Homo sapiens
taactatgcagagttgtttgg

SEQ ID NO: 2477 - RNA, 21 nt, RNAi-sense strand
acuaugcagaguuguuugguu

SEQ ID NO: 2478 - RNA, 21 nt, RNAi-antisense strand
ccaaacaacucugcauaguuu

SEQ ID NO: 2479 - DNA, 21 bp, Homo sapiens
tatgcagagttgtttggactt

SEQ ID NO: 2480 - RNA, 21 nt, RNAi-sense strand
ugcagaguuguuuggacuuuu

SEQ ID NO: 2481 - RNA, 21 nt, RNAi-antisense strand
aaguccaaacaacucugcauu

SEQ ID NO: 2482 - DNA, 21 bp, Homo sapiens
aactacgtagatctgatcaca

SEQ ID NO: 2483 - RNA, 21 nt, RNAi-sense strand
cuacguagaucugaucacauu

SEQ ID NO: 2484 - RNA, 21 nt, RNAi-antisense strand
ugugaucagaucuacguaguu

SEQ ID NO: 2485 - DNA, 21 bp, Homo sapiens
aacaggccgatatcgcattga

SEQ ID NO: 2486 - RNA, 21 nt, RNAi-sense strand
caggccgauaucgcauugauu

SEQ ID NO: 2487 - RNA, 21 nt, RNAi-antisense strand
ucaaugcgauaucggccuguu

SEQ ID NO: 2488 - DNA, 21 bp, Homo sapiens
aaagccacaacatgtccaagg

SEQ ID NO: 2489 - RNA, 21 nt, RNAi-sense strand
agccacaacauguccaagguu

SEQ ID NO: 2490 - RNA, 21 nt, RNAi-antisense strand
ccuuggacauguuguggcuuu

SEQ ID NO: 2491 - DNA, 21 bp, Homo sapiens
cagcaactacgtagatctgat

SEQ ID NO: 2492 - RNA, 21 nt, RNAi-sense strand
gcaacuacguagaucugauuu

SEQ ID NO: 2493 - RNA, 21 nt, RNAi-antisense strand
aucagaucuacguaguugcuu

SEQ ID NO: 2494 - DNA, 21 bp, Homo sapiens
caactacgtagatctgatcac

SEQ ID NO: 2495 - RNA, 21 nt, RNAi-sense strand
acuacguagaucugaucacuu

SEQ ID NO: 2496 - RNA, 21 nt, RNAi-antisense strand
gugaucagaucuacguaguuu

SEQ ID NO: 2497 - DNA, 21 bp, Homo sapiens
cagaacaggccgatatcgcat

SEQ ID NO: 2498 - RNA, 21 nt, RNAi-sense strand
gaacaggccgauaucgcauuu

SEQ ID NO: 2499 - RNA, 21 nt, RNAi-antisense strand
augcgauaucggccuguucuu

SEQ ID NO: 2500 - DNA, 21 bp, Homo sapiens
cagtttgtctacgactcctcg

SEQ ID NO: 2501 - RNA, 21 nt, RNAi-sense strand
guuugucuacgacuccucguu

SEQ ID NO: 2502 - RNA, 21 nt, RNAi-antisense strand
cgaggagucguagacaaacuu

SEQ ID NO: 2503 - DNA, 21 bp, Homo sapiens
cacttcaaagacgcagtcagt

SEQ ID NO: 2504 - RNA, 21 nt, RNAi-sense strand
cuucaaagacgcagucaguuu

SEQ ID NO: 2505 - RNA, 21 nt, RNAi-antisense strand
acugacugcgucuuugaaguu

SEQ ID NO: 2506 - DNA, 21 bp, Homo sapiens
catcatggtaacactcgcgat

SEQ ID NO: 2507 - RNA, 21 nt, RNAi-sense strand
ucaugguaacacucgcgauuu

SEQ ID NO: 2508 - RNA, 21 nt, RNAi-antisense strand
aucgcgaguguuaccaugauu

SEQ ID NO: 2509 - DNA, 21 bp, Homo sapiens
catggtaacactcgcgattta

SEQ ID NO: 2510 - RNA, 21 nt, RNAi-sense strand
ugguaacacucgcgauuuauu

SEQ ID NO: 2511 - RNA, 21 nt, RNAi-antisense strand
uaaaucgcgaguguuaccauu

SEQ ID NO: 2512 - DNA, 21 bp, Homo sapiens
gatctgatcacagaacaggcc

SEQ ID NO: 2513 - RNA, 21 nt, RNAi-sense strand
ucugaucacagaacaggccuu

SEQ ID NO: 2514 - RNA, 21 nt, RNAi-antisense strand
ggccuguucugugaucagauu

SEQ ID NO: 2515 - DNA, 21 bp, Homo sapiens
gatcacagaacaggccgatat

SEQ ID NO: 2516 - RNA, 21 nt, RNAi-sense strand
ucacagaacaggccgauauuu

SEQ ID NO: 2517 - RNA, 21 nt, RNAi-antisense strand
auaucggccuguucugugauu

SEQ ID NO: 2518 - DNA, 21 bp, Homo sapiens
gaacaggccgatatcgcattg

SEQ ID NO: 2519 - RNA, 21 nt, RNAi-sense strand
acaggccgauaucgcauuguu

SEQ ID NO: 2520 - RNA, 21 nt, RNAi-antisense strand
caaugcgauaucggccuguuu

SEQ ID NO: 2521 - DNA, 21 bp, Homo sapiens
gatcgcgcatatgcactcaaa

SEQ ID NO: 2522 - RNA, 21 nt, RNAi-sense strand
ucgcgcauaugcacucaaauu

SEQ ID NO: 2523 - RNA, 21 nt, RNAi-antisense strand
uuugagugcauaugcgcgauu

SEQ ID NO: 2524 - DNA, 21 bp, Homo sapiens
gaaagccacaacatgtccaag

SEQ ID NO: 2525 - RNA, 21 nt, RNAi-sense strand
aagccacaacauguccaaguu

SEQ ID NO: 2526 - RNA, 21 nt, RNAi-antisense strand
cuuggacauguuguggcuuuu

SEQ ID NO: 2527 - DNA, 21 bp, Homo sapiens
gaggctgagcaaagtgcagtt

SEQ ID NO: 2528 - RNA, 21 nt, RNAi-sense strand
ggcugagcaaagugcaguuuu

SEQ ID NO: 2529 - RNA, 21 nt, RNAi-antisense strand
aacugcacuuugcucagccuu

SEQ ID NO: 2530 - DNA, 21 bp, Homo sapiens
gaagacggtcaccatgatcct

SEQ ID NO: 2531 - RNA, 21 nt, RNAi-sense strand
agacggucaccaugauccuuu

SEQ ID NO: 2532 - RNA, 21 nt, RNAi-antisense strand
aggaucauggugaccgucuuu

SEQ ID NO: 2533 - DNA, 21 bp, Homo sapiens
tatgagtgtcaagctcaacaa

SEQ ID NO: 2534 - RNA, 21 nt, RNAi-sense strand
ugagugucaagcucaacaauu

SEQ ID NO: 2535 - RNA, 21 nt, RNAi-antisense strand
uuguugagcuugacacucauu

SEQ ID NO: 2536 - DNA, 21 bp, Homo sapiens
aataaatgttcgtggatgatg

SEQ ID NO: 2537 - RNA, 21 nt, RNAi-sense strand
uaaauguucguggaugauguu

SEQ ID NO: 2538 - RNA, 21 nt, RNAi-antisense strand
caucauccacgaacauuuauu

SEQ ID NO: 2539 - DNA, 21 bp, Homo sapiens
aaatgttcgtggatgatgatg

SEQ ID NO: 2540 - RNA, 21 nt, RNAi-sense strand
auguucguggaugaugauguu

SEQ ID NO: 2541 - RNA, 21 nt, RNAi-antisense strand
caucaucauccacgaacauuu

SEQ ID NO: 2542 - DNA, 21 bp, Homo sapiens
aatgttcgtggatgatgatga

SEQ ID NO: 2543 - RNA, 21 nt, RNAi-sense strand
uguucguggaugaugaugauu

SEQ ID NO: 2544 - RNA, 21 nt, RNAi-antisense strand
ucaucaucauccacgaacauu

SEQ ID NO: 2545 - DNA, 21 bp, Homo sapiens
aaatgcagcatcaacggcagc

SEQ ID NO: 2546 - RNA, 21 nt, RNAi-sense strand
augcagcaucaacggcagcuu

SEQ ID NO: 2547 - RNA, 21 nt, RNAi-antisense strand
gcugccguugaugcugcauuu

SEQ ID NO: 2548 - DNA, 21 bp, Homo sapiens
aatgcagcatcaacggcagca

SEQ ID NO: 2549 - RNA, 21 nt, RNAi-sense strand
ugcagcaucaacggcagcauu

SEQ ID NO: 2550 - RNA, 21 nt, RNAi-antisense strand
ugcugccguugaugcugcauu

SEQ ID NO: 2551 - DNA, 21 bp, Homo sapiens
aacgaggcaaactatgcaaga

SEQ ID NO: 2552 - RNA, 21 nt, RNAi-sense strand
cgaggcaaacuaugcaagauu

SEQ ID NO: 2553 - RNA, 21 nt, RNAi-antisense strand
ucuugcauaguuugccucguu

SEQ ID NO: 2554 - DNA, 21 bp, Homo sapiens
aaactatgcaagaggcaccag

SEQ ID NO: 2555 - RNA, 21 nt, RNAi-sense strand
acuaugcaagaggcaccaguu

SEQ ID NO: 2556 - RNA, 21 nt, RNAi-antisense strand
cuggugccucuugcauaguuu

SEQ ID NO: 2557 - DNA, 21 bp, Homo sapiens
aactatgcaagaggcaccaga

SEQ ID NO: 2558 - RNA, 21 nt, RNAi-sense strand
cuaugcaagaggcaccagauu

SEQ ID NO: 2559 - RNA, 21 nt, RNAi-antisense strand
ucuggugccucuugcauaguu

SEQ ID NO: 2560 - DNA, 21 bp, Homo sapiens
aagaggcaccagacttcctct

SEQ ID NO: 2561 - RNA, 21 nt, RNAi-sense strand
gaggcaccagacuuccucuuu

SEQ ID NO: 2562 - RNA, 21 nt, RNAi-antisense strand
agaggaagucuggugccucuu

SEQ ID NO: 2563 - DNA, 21 bp, Homo sapiens
aaggaccaacttctcagccga

SEQ ID NO: 2564 - RNA, 21 nt, RNAi-sense strand
ggaccaacuucucagccgauu

SEQ ID NO: 2565 - RNA, 21 nt, RNAi-antisense strand
ucggcugagaaguugguccuu

SEQ ID NO: 2566 - DNA, 21 bp, Homo sapiens
aacttctcagccgaatagctc

SEQ ID NO: 2567 - RNA, 21 nt, RNAi-sense strand
cuucucagccgaauagcucuu

SEQ ID NO: 2568 - RNA, 21 nt, RNAi-antisense strand
gagcuauucggcugagaaguu

SEQ ID NO: 2569 - DNA, 21 bp, Homo sapiens
aatagctccaagcaaactgtc

SEQ ID NO: 2570 - RNA, 21 nt, RNAi-sense strand
uagcuccaagcaaacugucuu

SEQ ID NO: 2571 - RNA, 21 nt, RNAi-antisense strand
gacaguuugcuuggagcuauu

SEQ ID NO: 2572 - DNA, 21 bp, Homo sapiens
aagcaaactgtcctgtcttgg

SEQ ID NO: 2573 - RNA, 21 nt, RNAi-sense strand
gcaaacuguccugucuugguu

SEQ ID NO: 2574 - RNA, 21 nt, RNAi-antisense strand
ccaagacaggacaguuugcuu

SEQ ID NO: 2575 - DNA, 21 bp, Homo sapiens
aaactgtcctgtcttggcaag

SEQ ID NO: 2576 - RNA, 21 nt, RNAi-sense strand
acuguccugucuuggcaaguu

SEQ ID NO: 2577 - RNA, 21 nt, RNAi-antisense strand
cuugccaagacaggacaguuu

SEQ ID NO: 2578 - DNA, 21 bp, Homo sapiens
aactgtcctgtcttggcaagc

SEQ ID NO: 2579 - RNA, 21 nt, RNAi-sense strand
cuguccugucuuggcaagcuu

SEQ ID NO: 2580 - RNA, 21 nt, RNAi-antisense strand
gcuugccaagacaggacaguu

SEQ ID NO: 2581 - DNA, 21 bp, Homo sapiens
aagctgcaatcgatgctgcta

SEQ ID NO: 2582 - RNA, 21 nt, RNAi-sense strand
gcugcaaucgaugcugcuauu

SEQ ID NO: 2583 - RNA, 21 nt, RNAi-antisense strand
uagcagcaucgauugcagcuu

SEQ ID NO: 2584 - DNA, 21 bp, Homo sapiens
aatcgatgctgctagacaggc

SEQ ID NO: 2585 - RNA, 21 nt, RNAi-sense strand
ucgaugcugcuagacaggcuu

SEQ ID NO: 2586 - RNA, 21 nt, RNAi-antisense strand
gccugucuagcagcaucgauu

SEQ ID NO: 2587 - DNA, 21 bp, Homo sapiens
aaactatgagcacctctgcac

SEQ ID NO: 2588 - RNA, 21 nt, RNAi-sense strand
acuaugagcaccucugcacuu

SEQ ID NO: 2589 - RNA, 21 nt, RNAi-antisense strand
gugcagaggugcucauaguuu

SEQ ID NO: 2590 - DNA, 21 bp, Homo sapiens
aactatgagcacctctgcacc

SEQ ID NO: 2591 - RNA, 21 nt, RNAi-sense strand
cuaugagcaccucugcaccuu

SEQ ID NO: 2592 - RNA, 21 nt, RNAi-antisense strand
ggugcagaggugcucauaguu

SEQ ID NO: 2593 - DNA, 21 bp, Homo sapiens
aaacgtcagcaatacgccaag

SEQ ID NO: 2594 - RNA, 21 nt, RNAi-sense strand
acgucagcaauacgccaaguu

SEQ ID NO: 2595 - RNA, 21 nt, RNAi-antisense strand
cuuggcguauugcugacguuu

SEQ ID NO: 2596 - DNA, 21 bp, Homo sapiens
aacgtcagcaatacgccaaga

SEQ ID NO: 2597 - RNA, 21 nt, RNAi-sense strand
cgucagcaauacgccaagauu

SEQ ID NO: 2598 - RNA, 21 nt, RNAi-antisense strand
ucuuggcguauugcugacguu

SEQ ID NO: 2599 - DNA, 21 bp, Homo sapiens
aactcgtccaacagccgacct

SEQ ID NO: 2600 - RNA, 21 nt, RNAi-sense strand
cucguccaacagccgaccuuu

SEQ ID NO: 2601 - RNA, 21 nt, RNAi-antisense strand
aggucggcuguuggacgaguu

SEQ ID NO: 2602 - DNA, 21 bp, Homo sapiens
aagagcctgcattagtatagt

SEQ ID NO: 2603 - RNA, 21 nt, RNAi-sense strand
gagccugcauuaguauaguuu

SEQ ID NO: 2604 - RNA, 21 nt, RNAi-antisense strand
acuauacuaaugcaggcucuu

SEQ ID NO: 2605 - DNA, 21 bp, Homo sapiens
aattgtgtggccttagctatt

SEQ ID NO: 2606 - RNA, 21 nt, RNAi-sense strand
uuguguggccuuagcuauuuu

SEQ ID NO: 2607 - RNA, 21 nt, RNAi-antisense strand
aauagcuaaggccacacaauu

SEQ ID NO: 2608 - DNA, 21 bp, Homo sapiens
aaagtagaatatgccttcctg

SEQ ID NO: 2609 - RNA, 21 nt, RNAi-sense strand
aguagaauaugccuuccuguu

SEQ ID NO: 2610 - RNA, 21 nt, RNAi-antisense strand
caggaaggcauauucuacuuu

SEQ ID NO: 2611 - DNA, 21 bp, Homo sapiens
aagtagaatatgccttcctga

SEQ ID NO: 2612 - RNA, 21 nt, RNAi-sense strand
guagaauaugccuuccugauu

SEQ ID NO: 2613 - RNA, 21 nt, RNAi-antisense strand
ucaggaaggcauauucuacuu

SEQ ID NO: 2614 - DNA, 21 bp, Homo sapiens
aatgcttatgttaggaatgga

SEQ ID NO: 2615 - RNA, 21 nt, RNAi-sense strand
ugcuuauguuaggaauggauu

SEQ ID NO: 2616 - RNA, 21 nt, RNAi-antisense strand
uccauuccuaacauaagcauu

SEQ ID NO: 2617 - DNA, 21 bp, Homo sapiens
aatggatggaatttactggat

SEQ ID NO: 2618 - RNA, 21 nt, RNAi-sense strand
uggauggaauuuacuggauuu

SEQ ID NO: 2619 - RNA, 21 nt, RNAi-antisense strand
auccaguaaauuccauccauu

SEQ ID NO: 2620 - DNA, 21 bp, Homo sapiens
aaccaaagaaacagaaggcgg

SEQ ID NO: 2621 - RNA, 21 nt, RNAi-sense strand
ccaaagaaacagaaggcgguu

SEQ ID NO: 2622 - RNA, 21 nt, RNAi-antisense strand
ccgccuucuguuucuuugguu

SEQ ID NO: 2623 - DNA, 21 bp, Homo sapiens
aaccactcaagcggcaaatct

SEQ ID NO: 2624 - RNA, 21 nt, RNAi-sense strand
ccacucaagcggcaaaucuuu

SEQ ID NO: 2625 - RNA, 21 nt, RNAi-antisense strand
agauuugccgcuugagugguu

SEQ ID NO: 2626 - DNA, 21 bp, Homo sapiens
aagcggcaaatctggaggctt

SEQ ID NO: 2627 - RNA, 21 nt, RNAi-sense strand
gcggcaaaucuggaggcuuuu

SEQ ID NO: 2628 - RNA, 21 nt, RNAi-antisense strand
aagccuccagauuugccgcuu

SEQ ID NO: 2629 - DNA, 21 bp, Homo sapiens
aaatctggaggctttgatgtc

SEQ ID NO: 2630 - RNA, 21 nt, RNAi-sense strand
aucuggaggcuuugaugucuu

SEQ ID NO: 2631 - RNA, 21 nt, RNAi-antisense strand
gacaucaaagccuccagauuu

SEQ ID NO: 2632 - DNA, 21 bp, Homo sapiens
aatctggaggctttgatgtca

SEQ ID NO: 2633 - RNA, 21 nt, RNAi-sense strand
ucuggaggcuuugaugucauu

SEQ ID NO: 2634 - RNA, 21 nt, RNAi-antisense strand
ugacaucaaagccuccagauu

SEQ ID NO: 2635 - DNA, 21 bp, Homo sapiens
aagttgtcctgaactccatta

SEQ ID NO: 2636 - RNA, 21 nt, RNAi-sense strand
guuguccugaacuccauuauu

SEQ ID NO: 2637 - RNA, 21 nt, RNAi-antisense strand
uaauggaguucaggacaacuu

SEQ ID NO: 2638 - DNA, 21 bp, Homo sapiens
aatggacgccagtgtactgcc

SEQ ID NO: 2639 - RNA, 21 nt, RNAi-sense strand
uggacgccaguguacugccuu

SEQ ID NO: 2640 - RNA, 21 nt, RNAi-antisense strand
ggcaguacacuggcguccauu

SEQ ID NO: 2641 - DNA, 21 bp, Homo sapiens
aatggcacggaatgtaggagt

SEQ ID NO: 2642 - RNA, 21 nt, RNAi-sense strand
uggcacggaauguaggaguuu

SEQ ID NO: 2643 - RNA, 21 nt, RNAi-antisense strand
acuccuacauuccgugccauu

SEQ ID NO: 2644 - DNA, 21 bp, Homo sapiens
aacggaggcatcaccaacttt

SEQ ID NO: 2645 - RNA, 21 nt, RNAi-sense strand
cggaggcaucaccaacuuuuu

SEQ ID NO: 2646 - RNA, 21 nt, RNAi-antisense strand
aaaguuggugaugccuccguu

SEQ ID NO: 2647 - DNA, 21 bp, Homo sapiens
aactttgcctttgccatgctt

SEQ ID NO: 2648 - RNA, 21 nt, RNAi-sense strand
cuuugccuuugccaugcuuuu

SEQ ID NO: 2649 - RNA, 21 nt, RNAi-antisense strand
aagcauggcaaaggcaaaguu

SEQ ID NO: 2650 - DNA, 21 bp, Homo sapiens
aacctggttcttggtgtcctt

SEQ ID NO: 2651 - RNA, 21 nt, RNAi-sense strand
ccugguucuugguguccuuuu

SEQ ID NO: 2652 - RNA, 21 nt, RNAi-antisense strand
aaggacaccaagaaccagguu

SEQ ID NO: 2653 - DNA, 21 bp, Homo sapiens
aattctcaaaggaaagagaga

SEQ ID NO: 2654 - RNA, 21 nt, RNAi-sense strand
uucucaaaggaaagagagauu

SEQ ID NO: 2655 - RNA, 21 nt, RNAi-antisense strand
ucucucuuuccuuugagaauu

SEQ ID NO: 2656 - DNA, 21 bp, Homo sapiens
aaaggaaagagagaaggcaaa

SEQ ID NO: 2657 - RNA, 21 nt, RNAi-sense strand
aggaaagagagaaggcaaauu

SEQ ID NO: 2658 - RNA, 21 nt, RNAi-antisense strand
uuugccuucucucuuuccuuu

SEQ ID NO: 2659 - DNA, 21 bp, Homo sapiens
aagcagcagctggaggaggat

SEQ ID NO: 2660 - RNA, 21 nt, RNAi-sense strand
gcagcagcuggaggaggauuu

SEQ ID NO: 2661 - RNA, 21 nt, RNAi-antisense strand
auccuccuccagcugcugcuu

SEQ ID NO: 2662 - DNA, 21 bp, Homo sapiens
aagctgaggacatcgatccgg

SEQ ID NO: 2663 - RNA, 21 nt, RNAi-sense strand
gcugaggacaucgauccgguu

SEQ ID NO: 2664 - RNA, 21 nt, RNAi-antisense strand
ccggaucgauguccucagcuu

SEQ ID NO: 2665 - DNA, 21 bp, Homo sapiens
aatgaggaagaaggaggagag

SEQ ID NO: 2666 - RNA, 21 nt, RNAi-sense strand
ugaggaagaaggaggagaguu

SEQ ID NO: 2667 - RNA, 21 nt, RNAi-antisense strand
cucuccuccuucuuccucauu

SEQ ID NO: 2668 - DNA, 21 bp, Homo sapiens
aagaaggaggagaggaaggca

SEQ ID NO: 2669 - RNA, 21 nt, RNAi-sense strand
gaaggaggagaggaaggcauu

SEQ ID NO: 2670 - RNA, 21 nt, RNAi-antisense strand
ugccuuccucuccuccuucuu

SEQ ID NO: 2671 - DNA, 21 bp, Homo sapiens
aaggaggagaggaaggcaaac

SEQ ID NO: 2672 - RNA, 21 nt, RNAi-sense strand
ggaggagaggaaggcaaacuu

SEQ ID NO: 2673 - RNA, 21 nt, RNAi-antisense strand
guuugccuuccucuccuccuu

SEQ ID NO: 2674 - DNA, 21 bp, Homo sapiens
aaggcaaacgaaatactagca

SEQ ID NO: 2675 - RNA, 21 nt, RNAi-sense strand
ggcaaacgaaauacuagcauu

SEQ ID NO: 2676 - RNA, 21 nt, RNAi-antisense strand
ugcuaguauuucguuugccuu

SEQ ID NO: 2677 - DNA, 21 bp, Homo sapiens
aacacagagaacgtcagcggt

SEQ ID NO: 2678 - RNA, 21 nt, RNAi-sense strand
cacagagaacgucagcgguuu

SEQ ID NO: 2679 - RNA, 21 nt, RNAi-antisense strand
accgcugacguucucuguguu

SEQ ID NO: 2680 - DNA, 21 bp, Homo sapiens
aacgtcagcggtgaaggcgag

SEQ ID NO: 2681 - RNA, 21 nt, RNAi-sense strand
cgucagcggugaaggcgaguu

SEQ ID NO: 2682 - RNA, 21 nt, RNAi-antisense strand
cucgccuucaccgcugacguu

SEQ ID NO: 2683 - DNA, 21 bp, Homo sapiens
aaggcgagaaccgaggctgct

SEQ ID NO: 2684 - RNA, 21 nt, RNAi-sense strand
ggcgagaaccgaggcugcuuu

SEQ ID NO: 2685 - RNA, 21 nt, RNAi-antisense strand
agcagccucgguucucgccuu

SEQ ID NO: 2686 - DNA, 21 bp, Homo sapiens
aaccgaggctgctgtggaagt

SEQ ID NO: 2687 - RNA, 21 nt, RNAi-sense strand
ccgaggcugcuguggaaguuu

SEQ ID NO: 2688 - RNA, 21 nt, RNAi-antisense strand
acuuccacagcagccucgguu

SEQ ID NO: 2689 - DNA, 21 bp, Homo sapiens
aagtctctggtgctggtggag

SEQ ID NO: 2690 - RNA, 21 nt, RNAi-sense strand
gucucuggugcugguggaguu

SEQ ID NO: 2691 - RNA, 21 nt, RNAi-antisense strand
cuccaccagcaccagagacuu

SEQ ID NO: 2692 - DNA, 21 bp, Homo sapiens
aaatccaaactcagccgacgc

SEQ ID NO: 2693 - RNA, 21 nt, RNAi-sense strand
auccaaacucagccgacgcuu

SEQ ID NO: 2694 - RNA, 21 nt, RNAi-antisense strand
gcgucggcugaguuuggauuu

SEQ ID NO: 2695 - DNA, 21 bp, Homo sapiens
aatccaaactcagccgacgct

SEQ ID NO: 2696 - RNA, 21 nt, RNAi-sense strand
uccaaacucagccgacgcuuu

SEQ ID NO: 2697 - RNA, 21 nt, RNAi-antisense strand
agcgucggcugaguuuggauu

SEQ ID NO: 2698 - DNA, 21 bp, Homo sapiens
aaactcagccgacgctggcgt

SEQ ID NO: 2699 - RNA, 21 nt, RNAi-sense strand
acucagccgacgcuggcguuu

SEQ ID NO: 2700 - RNA, 21 nt, RNAi-antisense strand
acgccagcgucggcugaguuu

SEQ ID NO: 2701 - DNA, 21 bp, Homo sapiens
aaccgattcaatcgcagaaga

SEQ ID NO: 2702 - RNA, 21 nt, RNAi-sense strand
ccgauucaaucgcagaagauu

SEQ ID NO: 2703 - RNA, 21 nt, RNAi-antisense strand
ucuucugcgauugaaucgguu

SEQ ID NO: 2704 - DNA, 21 bp, Homo sapiens
aacaccttaaccatttcctct

SEQ ID NO: 2705 - RNA, 21 nt, RNAi-sense strand
caccuuaaccauuuccucuuu

SEQ ID NO: 2706 - RNA, 21 nt, RNAi-antisense strand
agaggaaaugguuaagguguu

SEQ ID NO: 2707 - DNA, 21 bp, Homo sapiens
aaccatttcctctgagcacta

SEQ ID NO: 2708 - RNA, 21 nt, RNAi-sense strand
ccauuuccucugagcacuauu

SEQ ID NO: 2709 - RNA, 21 nt, RNAi-antisense strand
uagugcucagaggaaaugguu

SEQ ID NO: 2710 - DNA, 21 bp, Homo sapiens
aatcagccagattggttgaca

SEQ ID NO: 2711 - RNA, 21 nt, RNAi-sense strand
ucagccagauugguugacauu

SEQ ID NO: 2712 - RNA, 21 nt, RNAi-antisense strand
ugucaaccaaucuggcugauu

SEQ ID NO: 2713 - DNA, 21 bp, Homo sapiens
aagatattgccaacaaagtcc

SEQ ID NO: 2714 - RNA, 21 nt, RNAi-sense strand
gauauugccaacaaaguccuu

SEQ ID NO: 2715 - RNA, 21 nt, RNAi-antisense strand
ggacuuuguuggcaauaucuu

SEQ ID NO: 2716 - DNA, 21 bp, Homo sapiens
aacaaagtcctcttggctctg

SEQ ID NO: 2717 - RNA, 21 nt, RNAi-sense strand
caaaguccucuuggcucuguu

SEQ ID NO: 2718 - RNA, 21 nt, RNAi-antisense strand
cagagccaagaggacuuuguu

SEQ ID NO: 2719 - DNA, 21 bp, Homo sapiens
aaagtcctcttggctctgttc

SEQ ID NO: 2720 - RNA, 21 nt, RNAi-sense strand
aguccucuuggcucuguucuu

SEQ ID NO: 2721 - RNA, 21 nt, RNAi-antisense strand
gaacagagccaagaggacuuu

SEQ ID NO: 2722 - DNA, 21 bp, Homo sapiens
aagtcctcttggctctgttca

SEQ ID NO: 2723 - RNA, 21 nt, RNAi-sense strand
guccucuuggcucuguucauu

SEQ ID NO: 2724 - RNA, 21 nt, RNAi-antisense strand
ugaacagagccaagaggacuu

SEQ ID NO: 2725 - DNA, 21 bp, Homo sapiens
aagcatatttcgtctctcttt

SEQ ID NO: 2726 - RNA, 21 nt, RNAi-sense strand
gcauauuucgucucucuuuuu

SEQ ID NO: 2727 - RNA, 21 nt, RNAi-antisense strand
aaagagagacgaaauaugcuu

SEQ ID NO: 2728 - DNA, 21 bp, Homo sapiens
aaccggtttgattgcttcgtg

SEQ ID NO: 2729 - RNA, 21 nt, RNAi-sense strand
ccgguuugauugcuucguguu

SEQ ID NO: 2730 - RNA, 21 nt, RNAi-antisense strand
cacgaagcaaucaaaccgguu

SEQ ID NO: 2731 - DNA, 21 bp, Homo sapiens
aatcactgagacgatcctggt

SEQ ID NO: 2732 - RNA, 21 nt, RNAi-sense strand
ucacugagacgauccugguuu

SEQ ID NO: 2733 - RNA, 21 nt, RNAi-antisense strand
accaggaucgucucagugauu

SEQ ID NO: 2734 - DNA, 21 bp, Homo sapiens
aagaatcttcaaagtgaccag

SEQ ID NO: 2735 - RNA, 21 nt, RNAi-sense strand
gaaucuucaaagugaccaguu

SEQ ID NO: 2736 - RNA, 21 nt, RNAi-antisense strand
cuggucacuuugaagauucuu

SEQ ID NO: 2737 - DNA, 21 bp, Homo sapiens
aatcttcaaagtgaccaggca

SEQ ID NO: 2738 - RNA, 21 nt, RNAi-sense strand
ucuucaaagugaccaggcauu

SEQ ID NO: 2739 - RNA, 21 nt, RNAi-antisense strand
ugccuggucacuuugaagauu

SEQ ID NO: 2740 - DNA, 21 bp, Homo sapiens
aaagtgaccaggcactggact

SEQ ID NO: 2741 - RNA, 21 nt, RNAi-sense strand
agugaccaggcacuggacuuu

SEQ ID NO: 2742 - RNA, 21 nt, RNAi-antisense strand
aguccagugccuggucacuuu

SEQ ID NO: 2743 - DNA, 21 bp, Homo sapiens
aagtgaccaggcactggactt

SEQ ID NO: 2744 - RNA, 21 nt, RNAi-sense strand
gugaccaggcacuggacuuuu

SEQ ID NO: 2745 - RNA, 21 nt, RNAi-antisense strand
aaguccagugccuggucacuu

SEQ ID NO: 2746 - DNA, 21 bp, Homo sapiens
aacttagtggcatccttatta

SEQ ID NO: 2747 - RNA, 21 nt, RNAi-sense strand
cuuaguggcauccuuauuauu

SEQ ID NO: 2748 - RNA, 21 nt, RNAi-antisense strand
uaauaaggaugccacuaaguu

SEQ ID NO: 2749 - DNA, 21 bp, Homo sapiens
aaactccatgaagtccatcgc

SEQ ID NO: 2750 - RNA, 21 nt, RNAi-sense strand
acuccaugaaguccaucgcuu

SEQ ID NO: 2751 - RNA, 21 nt, RNAi-antisense strand
gcgauggacuucauggaguuu

SEQ ID NO: 2752 - DNA, 21 bp, Homo sapiens
aactccatgaagtccatcgct

SEQ ID NO: 2753 - RNA, 21 nt, RNAi-sense strand
cuccaugaaguccaucgcuuu

SEQ ID NO: 2754 - RNA, 21 nt, RNAi-antisense strand
agcgauggacuucauggaguu

SEQ ID NO: 2755 - DNA, 21 bp, Homo sapiens
aagtccatcgcttcgctgttg

SEQ ID NO: 2756 - RNA, 21 nt, RNAi-sense strand
guccaucgcuucgcuguuguu

SEQ ID NO: 2757 - RNA, 21 nt, RNAi-antisense strand
caacagcgaagcgauggacuu

SEQ ID NO: 2758 - DNA, 21 bp, Homo sapiens
aaacgcaaaccaagcggagca

SEQ ID NO: 2759 - RNA, 21 nt, RNAi-sense strand
acgcaaaccaagcggagcauu

SEQ ID NO: 2760 - RNA, 21 nt, RNAi-antisense strand
ugcuccgcuugguuugcguuu

SEQ ID NO: 2761 - DNA, 21 bp, Homo sapiens
aacgcaaaccaagcggagcac

SEQ ID NO: 2762 - RNA, 21 nt, RNAi-sense strand
cgcaaaccaagcggagcacuu

SEQ ID NO: 2763 - RNA, 21 nt, RNAi-antisense strand
gugcuccgcuugguuugcguu

SEQ ID NO: 2764 - DNA, 21 bp, Homo sapiens
aaaccaagcggagcacctttg

SEQ ID NO: 2765 - RNA, 21 nt, RNAi-sense strand
accaagcggagcaccuuuguu

SEQ ID NO: 2766 - RNA, 21 nt, RNAi-antisense strand
caaaggugcuccgcuugguuu

SEQ ID NO: 2767 - DNA, 21 bp, Homo sapiens
aaccaagcggagcacctttga

SEQ ID NO: 2768 - RNA, 21 nt, RNAi-sense strand
ccaagcggagcaccuuugauu

SEQ ID NO: 2769 - RNA, 21 nt, RNAi-antisense strand
ucaaaggugcuccgcuugguu

SEQ ID NO: 2770 - DNA, 21 bp, Homo sapiens
aagcggagcacctttgacaat

SEQ ID NO: 2771 - RNA, 21 nt, RNAi-sense strand
gcggagcaccuuugacaauuu

SEQ ID NO: 2772 - RNA, 21 nt, RNAi-antisense strand
auugucaaaggugcuccgcuu

SEQ ID NO: 2773 - DNA, 21 bp, Homo sapiens
aagcacttctcacagtgttcc

SEQ ID NO: 2774 - RNA, 21 nt, RNAi-sense strand
gcacuucucacaguguuccuu

SEQ ID NO: 2775 - RNA, 21 nt, RNAi-antisense strand
ggaacacugugagaagugcuu

SEQ ID NO: 2776 - DNA, 21 bp, Homo sapiens
aagactggaatgctgtgatgt

SEQ ID NO: 2777 - RNA, 21 nt, RNAi-sense strand
gacuggaaugcugugauguuu

SEQ ID NO: 2778 - RNA, 21 nt, RNAi-antisense strand
acaucacagcauuccagucuu

SEQ ID NO: 2779 - DNA, 21 bp, Homo sapiens
aatgctgtgatgtacgatggc

SEQ ID NO: 2780 - RNA, 21 nt, RNAi-sense strand
ugcugugauguacgauggcuu

SEQ ID NO: 2781 - RNA, 21 nt, RNAi-antisense strand
gccaucguacaucacagcauu

SEQ ID NO: 2782 - DNA, 21 bp, Homo sapiens
aatgatcgtctgcatctactt

SEQ ID NO: 2783 - RNA, 21 nt, RNAi-sense strand
ugaucgucugcaucuacuuuu

SEQ ID NO: 2784 - RNA, 21 nt, RNAi-antisense strand
aaguagaugcagacgaucauu

SEQ ID NO: 2785 - DNA, 21 bp, Homo sapiens
aatgtcttcttggccatcgct

SEQ ID NO: 2786 - RNA, 21 nt, RNAi-sense strand
ugucuucuuggccaucgcuuu

SEQ ID NO: 2787 - RNA, 21 nt, RNAi-antisense strand
agcgauggccaagaagacauu

SEQ ID NO: 2788 - DNA, 21 bp, Homo sapiens
aatttggctgatgctgaaagt

SEQ ID NO: 2789 - RNA, 21 nt, RNAi-sense strand
uuuggcugaugcugaaaguuu

SEQ ID NO: 2790 - RNA, 21 nt, RNAi-antisense strand
acuuucagcaucagccaaauu

SEQ ID NO: 2791 - DNA, 21 bp, Homo sapiens
aaagtctgaacactgctcaga

SEQ ID NO: 2792 - RNA, 21 nt, RNAi-sense strand
agucugaacacugcucagauu

SEQ ID NO: 2793 - RNA, 21 nt, RNAi-antisense strand
ucugagcaguguucagacuuu

SEQ ID NO: 2794 - DNA, 21 bp, Homo sapiens
aagtctgaacactgctcagaa

SEQ ID NO: 2795 - RNA, 21 nt, RNAi-sense strand
gucugaacacugcucagaauu

SEQ ID NO: 2796 - RNA, 21 nt, RNAi-antisense strand
uucugagcaguguucagacuu

SEQ ID NO: 2797 - DNA, 21 bp, Homo sapiens
aacactgctcagaaagaagaa

SEQ ID NO: 2798 - RNA, 21 nt, RNAi-sense strand
cacugcucagaaagaagaauu

SEQ ID NO: 2799 - RNA, 21 nt, RNAi-antisense strand
uucuucuuucugagcaguguu

SEQ ID NO: 2800 - DNA, 21 bp, Homo sapiens
aaagaacaacaaaccagaagt

SEQ ID NO: 2801 - RNA, 21 nt, RNAi-sense strand
agaacaacaaaccagaaguuu

SEQ ID NO: 2802 - RNA, 21 nt, RNAi-antisense strand
acuucugguuuguuguucuuu

SEQ ID NO: 2803 - DNA, 21 bp, Homo sapiens
aagaacaacaaaccagaagtc

SEQ ID NO: 2804 - RNA, 21 nt, RNAi-sense strand
gaacaacaaaccagaagucuu

SEQ ID NO: 2805 - RNA, 21 nt, RNAi-antisense strand
gacuucugguuuguuguucuu

SEQ ID NO: 2806 - DNA, 21 bp, Homo sapiens
aacaacaaaccagaagtcaac

SEQ ID NO: 2807 - RNA, 21 nt, RNAi-sense strand
caacaaaccagaagucaacuu

SEQ ID NO: 2808 - RNA, 21 nt, RNAi-antisense strand
guugacuucugguuuguuguu

SEQ ID NO: 2809 - DNA, 21 bp, Homo sapiens
aacaaaccagaagtcaaccag

SEQ ID NO: 2810 - RNA, 21 nt, RNAi-sense strand
caaaccagaagucaaccaguu

SEQ ID NO: 2811 - RNA, 21 nt, RNAi-antisense strand
cugguugacuucugguuuguu

SEQ ID NO: 2812 - DNA, 21 bp, Homo sapiens
aaaccagaagtcaaccagata

SEQ ID NO: 2813 - RNA, 21 nt, RNAi-sense strand
accagaagucaaccagauauu

SEQ ID NO: 2814 - RNA, 21 nt, RNAi-antisense strand
uaucugguugacuucugguuu

SEQ ID NO: 2815 - DNA, 21 bp, Homo sapiens
aaccagaagtcaaccagatag

SEQ ID NO: 2816 - RNA, 21 nt, RNAi-sense strand
ccagaagucaaccagauaguu

SEQ ID NO: 2817 - RNA, 21 nt, RNAi-antisense strand
cuaucugguugacuucugguu

SEQ ID NO: 2818 - DNA, 21 bp, Homo sapiens
aagtcaaccagatagccaaca

SEQ ID NO: 2819 - RNA, 21 nt, RNAi-sense strand
gucaaccagauagccaacauu

SEQ ID NO: 2820 - RNA, 21 nt, RNAi-antisense strand
uguuggcuaucugguugacuu

SEQ ID NO: 2821 - DNA, 21 bp, Homo sapiens
aaccagatagccaacagtgac

SEQ ID NO: 2822 - RNA, 21 nt, RNAi-sense strand
ccagauagccaacagugacuu

SEQ ID NO: 2823 - RNA, 21 nt, RNAi-antisense strand
gucacuguuggcuaucugguu

SEQ ID NO: 2824 - DNA, 21 bp, Homo sapiens
aacagtgacaacaaggttaca

SEQ ID NO: 2825 - RNA, 21 nt, RNAi-sense strand
cagugacaacaagguuacauu

SEQ ID NO: 2826 - RNA, 21 nt, RNAi-antisense strand
uguaaccuuguugucacuguu

SEQ ID NO: 2827 - DNA, 21 bp, Homo sapiens
aacaaggttacaattgatgac

SEQ ID NO: 2828 - RNA, 21 nt, RNAi-sense strand
caagguuacaauugaugacuu

SEQ ID NO: 2829 - RNA, 21 nt, RNAi-antisense strand
gucaucaauuguaaccuuguu

SEQ ID NO: 2830 - DNA, 21 bp, Homo sapiens
aagaggatgaagacaaggacc

SEQ ID NO: 2831 - RNA, 21 nt, RNAi-sense strand
gaggaugaagacaaggaccuu

SEQ ID NO: 2832 - RNA, 21 nt, RNAi-antisense strand
gguccuugucuucauccucuu

SEQ ID NO: 2833 - DNA, 21 bp, Homo sapiens
aagaggaagaggaagaggagg

SEQ ID NO: 2834 - RNA, 21 nt, RNAi-sense strand
gaggaagaggaagaggagguu

SEQ ID NO: 2835 - RNA, 21 nt, RNAi-antisense strand
ccuccucuuccucuuccucuu

SEQ ID NO: 2836 - DNA, 21 bp, Homo sapiens
aagaggaagaggaggaggatg

SEQ ID NO: 2837 - RNA, 21 nt, RNAi-sense strand
gaggaagaggaggaggauguu

SEQ ID NO: 2838 - RNA, 21 nt, RNAi-antisense strand
cauccuccuccucuuccucuu

SEQ ID NO: 2839 - DNA, 21 bp, Homo sapiens
aagaggaggaggatgaacctg

SEQ ID NO: 2840 - RNA, 21 nt, RNAi-sense strand
gaggaggaggaugaaccuguu

SEQ ID NO: 2841 - RNA, 21 nt, RNAi-antisense strand
cagguucauccuccuccucuu

SEQ ID NO: 2842 - DNA, 21 bp, Homo sapiens
aacctgaggttcctgccggac

SEQ ID NO: 2843 - RNA, 21 nt, RNAi-sense strand
ccugagguuccugccggacuu

SEQ ID NO: 2844 - RNA, 21 nt, RNAi-antisense strand
guccggcaggaaccucagguu

SEQ ID NO: 2845 - DNA, 21 bp, Homo sapiens
aaggatctcggagttgaacat

SEQ ID NO: 2846 - RNA, 21 nt, RNAi-sense strand
ggaucucggaguugaacauuu

SEQ ID NO: 2847 - RNA, 21 nt, RNAi-antisense strand
auguucaacuccgagauccuu

SEQ ID NO: 2848 - DNA, 21 bp, Homo sapiens
aagctcatcaaccaccacatc

SEQ ID NO: 2849 - RNA, 21 nt, RNAi-sense strand
gcucaucaaccaccacaucuu

SEQ ID NO: 2850 - RNA, 21 nt, RNAi-antisense strand
gauguggugguugaugagcuu

SEQ ID NO: 2851 - DNA, 21 bp, Homo sapiens
aaccaccacatcttcaccaac

SEQ ID NO: 2852 - RNA, 21 nt, RNAi-sense strand
ccaccacaucuucaccaacuu

SEQ ID NO: 2853 - RNA, 21 nt, RNAi-antisense strand
guuggugaagauguggugguu

SEQ ID NO: 2854 - DNA, 21 bp, Homo sapiens
aacctcatccttgtcttcatc

SEQ ID NO: 2855 - RNA, 21 nt, RNAi-sense strand
ccucauccuugucuucaucuu

SEQ ID NO: 2856 - RNA, 21 nt, RNAi-antisense strand
gaugaagacaaggaugagguu

SEQ ID NO: 2857 - DNA, 21 bp, Homo sapiens
aactacttcaatttgctggat

SEQ ID NO: 2858 - RNA, 21 nt, RNAi-sense strand
cuacuucaauuugcuggauuu

SEQ ID NO: 2859 - RNA, 21 nt, RNAi-antisense strand
auccagcaaauugaaguaguu

SEQ ID NO: 2860 - DNA, 21 bp, Homo sapiens
aatttgctggatatgctggtg

SEQ ID NO: 2861 - RNA, 21 nt, RNAi-sense strand
uuugcuggauaugcugguguu

SEQ ID NO: 2862 - RNA, 21 nt, RNAi-antisense strand
caccagcauauccagcaaauu

SEQ ID NO: 2863 - DNA, 21 bp, Homo sapiens
aatccagtgccatctccgttg

SEQ ID NO: 2864 - RNA, 21 nt, RNAi-sense strand
uccagugccaucuccguuguu

SEQ ID NO: 2865 - RNA, 21 nt, RNAi-antisense strand
caacggagauggcacuggauu

SEQ ID NO: 2866 - DNA, 21 bp, Homo sapiens
aaaggacttaagcacgtggtc

SEQ ID NO: 2867 - RNA, 21 nt, RNAi-sense strand
aggacuuaagcacguggucuu

SEQ ID NO: 2868 - RNA, 21 nt, RNAi-antisense strand
gaccacgugcuuaaguccuuu

SEQ ID NO: 2869 - DNA, 21 bp, Homo sapiens
aaggacttaagcacgtggtcc

SEQ ID NO: 2870 - RNA, 21 nt, RNAi-sense strand
ggacuuaagcacgugguccuu

SEQ ID NO: 2871 - RNA, 21 nt, RNAi-antisense strand
ggaccacgugcuuaaguccuu

SEQ ID NO: 2872 - DNA, 21 bp, Homo sapiens
aagcacgtggtccagtgcgtc

SEQ ID NO: 2873 - RNA, 21 nt, RNAi-sense strand
gcacgugguccagugcgucuu

SEQ ID NO: 2874 - RNA, 21 nt, RNAi-antisense strand
gacgcacuggaccacgugcuu

SEQ ID NO: 2875 - DNA, 21 bp, Homo sapiens
aacatcatgatcgtcactacc

SEQ ID NO: 2876 - RNA, 21 nt, RNAi-sense strand
caucaugaucgucacuaccuu

SEQ ID NO: 2877 - RNA, 21 nt, RNAi-antisense strand
gguagugacgaucaugauguu

SEQ ID NO: 2878 - DNA, 21 bp, Homo sapiens
aagttctatcgctgtacggat

SEQ ID NO: 2879 - RNA, 21 nt, RNAi-sense strand
guucuaucgcuguacggauuu

SEQ ID NO: 2880 - RNA, 21 nt, RNAi-antisense strand
auccguacagcgauagaacuu

SEQ ID NO: 2881 - DNA, 21 bp, Homo sapiens
aaacagtgatttcaacttcga

SEQ ID NO: 2882 - RNA, 21 nt, RNAi-sense strand
acagugauuucaacuucgauu

SEQ ID NO: 2883 - RNA, 21 nt, RNAi-antisense strand
ucgaaguugaaaucacuguuu

SEQ ID NO: 2884 - DNA, 21 bp, Homo sapiens
aacagtgatttcaacttcgac

SEQ ID NO: 2885 - RNA, 21 nt, RNAi-sense strand
cagugauuucaacuucgacuu

SEQ ID NO: 2886 - RNA, 21 nt, RNAi-antisense strand
gucgaaguugaaaucacuguu

SEQ ID NO: 2887 - DNA, 21 bp, Homo sapiens
aacttcgacaacgtcctctct

SEQ ID NO: 2888 - RNA, 21 nt, RNAi-sense strand
cuucgacaacguccucucuuu

SEQ ID NO: 2889 - RNA, 21 nt, RNAi-antisense strand
agagaggacguugucgaaguu

SEQ ID NO: 2890 - DNA, 21 bp, Homo sapiens
aacgtcctctctgctatgatg

SEQ ID NO: 2891 - RNA, 21 nt, RNAi-sense strand
cguccucucugcuaugauguu

SEQ ID NO: 2892 - RNA, 21 nt, RNAi-antisense strand
caucauagcagagaggacguu

SEQ ID NO: 2893 - DNA, 21 bp, Homo sapiens
aaagccatcgactcgaatgga

SEQ ID NO: 2894 - RNA, 21 nt, RNAi-sense strand
agccaucgacucgaauggauu

SEQ ID NO: 2895 - RNA, 21 nt, RNAi-antisense strand
uccauucgagucgauggcuuu

SEQ ID NO: 2896 - DNA, 21 bp, Homo sapiens
aagccatcgactcgaatggag

SEQ ID NO: 2897 - RNA, 21 nt, RNAi-sense strand
gccaucgacucgaauggaguu

SEQ ID NO: 2898 - RNA, 21 nt, RNAi-antisense strand
cuccauucgagucgauggcuu

SEQ ID NO: 2899 - DNA, 21 bp, Homo sapiens
aatctacaaccaccgcgtgga

SEQ ID NO: 2900 - RNA, 21 nt, RNAi-sense strand
ucuacaaccaccgcguggauu

SEQ ID NO: 2901 - RNA, 21 nt, RNAi-antisense strand
uccacgcggugguuguagauu

SEQ ID NO: 2902 - DNA, 21 bp, Homo sapiens
aaccaccgcgtggagatctcc

SEQ ID NO: 2903 - RNA, 21 nt, RNAi-sense strand
ccaccgcguggagaucuccuu

SEQ ID NO: 2904 - RNA, 21 nt, RNAi-antisense strand
ggagaucuccacgcggugguu

SEQ ID NO: 2905 - DNA, 21 bp, Homo sapiens
aaagagtataagaactgtgag

SEQ ID NO: 2906 - RNA, 21 nt, RNAi-sense strand
agaguauaagaacugugaguu

SEQ ID NO: 2907 - RNA, 21 nt, RNAi-antisense strand
cucacaguucuuauacucuuu

SEQ ID NO: 2908 - DNA, 21 bp, Homo sapiens
aagagtataagaactgtgagc

SEQ ID NO: 2909 - RNA, 21 nt, RNAi-sense strand
gaguauaagaacugugagcuu

SEQ ID NO: 2910 - RNA, 21 nt, RNAi-antisense strand
gcucacaguucuuauacucuu

SEQ ID NO: 2911 - DNA, 21 bp, Homo sapiens
aagaactgtgagctggacaaa

SEQ ID NO: 2912 - RNA, 21 nt, RNAi-sense strand
gaacugugagcuggacaaauu

SEQ ID NO: 2913 - RNA, 21 nt, RNAi-antisense strand
uuuguccagcucacaguucuu

SEQ ID NO: 2914 - DNA, 21 bp, Homo sapiens
aaatcagcgtcagtgtgttga

SEQ ID NO: 2915 - RNA, 21 nt, RNAi-sense strand
aucagcgucaguguguugauu

SEQ ID NO: 2916 - RNA, 21 nt, RNAi-antisense strand
ucaacacacugacgcugauuu

SEQ ID NO: 2917 - DNA, 21 bp, Homo sapiens
aatcagcgtcagtgtgttgaa

SEQ ID NO: 2918 - RNA, 21 nt, RNAi-sense strand
ucagcgucaguguguugaauu

SEQ ID NO: 2919 - RNA, 21 nt, RNAi-antisense strand
uucaacacacugacgcugauu

SEQ ID NO: 2920 - DNA, 21 bp, Homo sapiens
aatacgccttgaaagcacgtc

SEQ ID NO: 2921 - RNA, 21 nt, RNAi-sense strand
uacgccuugaaagcacgucuu

SEQ ID NO: 2922 - RNA, 21 nt, RNAi-antisense strand
gacgugcuuucaaggcguauu

SEQ ID NO: 2923 - DNA, 21 bp, Homo sapiens
aagttctggtacgtggtgaac

SEQ ID NO: 2924 - RNA, 21 nt, RNAi-sense strand
guucugguacguggugaacuu

SEQ ID NO: 2925 - RNA, 21 nt, RNAi-antisense strand
guucaccacguaccagaacuu

SEQ ID NO: 2926 - DNA, 21 bp, Homo sapiens
aactcttcgcctttcgaatac

SEQ ID NO: 2927 - RNA, 21 nt, RNAi-sense strand
cucuucgccuuucgaauacuu

SEQ ID NO: 2928 - RNA, 21 nt, RNAi-antisense strand
guauucgaaaggcgaagaguu

SEQ ID NO: 2929 - DNA, 21 bp, Homo sapiens
aatacatgatgtttgtcctca

SEQ ID NO: 2930 - RNA, 21 nt, RNAi-sense strand
uacaugauguuuguccucauu

SEQ ID NO: 2931 - RNA, 21 nt, RNAi-antisense strand
ugaggacaaacaucauguauu

SEQ ID NO: 2932 - DNA, 21 bp, Homo sapiens
aacacactctgcttggccatg

SEQ ID NO: 2933 - RNA, 21 nt, RNAi-sense strand
cacacucugcuuggccauguu

SEQ ID NO: 2934 - RNA, 21 nt, RNAi-antisense strand
cauggccaagcagaguguguu

SEQ ID NO: 2935 - DNA, 21 bp, Homo sapiens
aagatgttcaatgatgccatg

SEQ ID NO: 2936 - RNA, 21 nt, RNAi-sense strand
gauguucaaugaugccauguu

SEQ ID NO: 2937 - RNA, 21 nt, RNAi-antisense strand
cauggcaucauugaacaucuu

SEQ ID NO: 2938 - DNA, 21 bp, Homo sapiens
aatgatgccatggacattctg

SEQ ID NO: 2939 - RNA, 21 nt, RNAi-sense strand
ugaugccauggacauucuguu

SEQ ID NO: 2940 - RNA, 21 nt, RNAi-antisense strand
cagaauguccauggcaucauu

SEQ ID NO: 2941 - DNA, 21 bp, Homo sapiens
aaagtcatcgcatttaagcct

SEQ ID NO: 2942 - RNA, 21 nt, RNAi-sense strand
agucaucgcauuuaagccuuu

SEQ ID NO: 2943 - RNA, 21 nt, RNAi-antisense strand
aggcuuaaaugcgaugacuuu

SEQ ID NO: 2944 - DNA, 21 bp, Homo sapiens
aagtcatcgcatttaagccta

SEQ ID NO: 2945 - RNA, 21 nt, RNAi-sense strand
gucaucgcauuuaagccuauu

SEQ ID NO: 2946 - RNA, 21 nt, RNAi-antisense strand
uaggcuuaaaugcgaugacuu

SEQ ID NO: 2947 - DNA, 21 bp, Homo sapiens
aatcggcagcattatagacgt

SEQ ID NO: 2948 - RNA, 21 nt, RNAi-sense strand
ucggcagcauuauagacguuu

SEQ ID NO: 2949 - RNA, 21 nt, RNAi-antisense strand
acgucuauaaugcugccgauu

SEQ ID NO: 2950 - DNA, 21 bp, Homo sapiens
aactctgaagagagcaataga

SEQ ID NO: 2951 - RNA, 21 nt, RNAi-sense strand
cucugaagagagcaauagauu

SEQ ID NO: 2952 - RNA, 21 nt, RNAi-antisense strand
ucuauugcucucuucagaguu

SEQ ID NO: 2953 - DNA, 21 bp, Homo sapiens
aagagagcaatagaatctcca

SEQ ID NO: 2954 - RNA, 21 nt, RNAi-sense strand
gagagcaauagaaucuccauu

SEQ ID NO: 2955 - RNA, 21 nt, RNAi-antisense strand
uggagauucuauugcucucuu

SEQ ID NO: 2956 - DNA, 21 bp, Homo sapiens
aatagaatctccatcaccttt

SEQ ID NO: 2957 - RNA, 21 nt, RNAi-sense strand
uagaaucuccaucaccuuuuu

SEQ ID NO: 2958 - RNA, 21 nt, RNAi-antisense strand
aaaggugauggagauucuauu

SEQ ID NO: 2959 - DNA, 21 bp, Homo sapiens
aaggcatccggacattgctgt

SEQ ID NO: 2960 - RNA, 21 nt, RNAi-sense strand
ggcauccggacauugcuguuu

SEQ ID NO: 2961 - RNA, 21 nt, RNAi-antisense strand
acagcaauguccggaugccuu

SEQ ID NO: 2962 - DNA, 21 bp, Homo sapiens
aaagttgccatgagagataac

SEQ ID NO: 2963 - RNA, 21 nt, RNAi-sense strand
aguugccaugagagauaacuu

SEQ ID NO: 2964 - RNA, 21 nt, RNAi-antisense strand
guuaucucucauggcaacuuu

SEQ ID NO: 2965 - DNA, 21 bp, Homo sapiens
aagttgccatgagagataaca

SEQ ID NO: 2966 - RNA, 21 nt, RNAi-sense strand
guugccaugagagauaacauu

SEQ ID NO: 2967 - RNA, 21 nt, RNAi-antisense strand
uguuaucucucauggcaacuu

SEQ ID NO: 2968 - DNA, 21 bp, Homo sapiens
aacaaccagatcaataggaac

SEQ ID NO: 2969 - RNA, 21 nt, RNAi-sense strand
caaccagaucaauaggaacuu

SEQ ID NO: 2970 - RNA, 21 nt, RNAi-antisense strand
guuccuauugaucugguuguu

SEQ ID NO: 2971 - DNA, 21 bp, Homo sapiens
aaccagatcaataggaacaat

SEQ ID NO: 2972 - RNA, 21 nt, RNAi-sense strand
ccagaucaauaggaacaauuu

SEQ ID NO: 2973 - RNA, 21 nt, RNAi-antisense strand
auuguuccuauugaucugguu

SEQ ID NO: 2974 - DNA, 21 bp, Homo sapiens
aataggaacaataacttccag

SEQ ID NO: 2975 - RNA, 21 nt, RNAi-sense strand
uaggaacaauaacuuccaguu

SEQ ID NO: 2976 - RNA, 21 nt, RNAi-antisense strand
cuggaaguuauuguuccuauu

SEQ ID NO: 2977 - DNA, 21 bp, Homo sapiens
aacaataacttccagacgttt

SEQ ID NO: 2978 - RNA, 21 nt, RNAi-sense strand
caauaacuuccagacguuuuu

SEQ ID NO: 2979 - RNA, 21 nt, RNAi-antisense strand
aaacgucuggaaguuauuguu

SEQ ID NO: 2980 - DNA, 21 bp, Homo sapiens
aacaggtgaggcctggcagga

SEQ ID NO: 2981 - RNA, 21 nt, RNAi-sense strand
caggugaggccuggcaggauu

SEQ ID NO: 2982 - RNA, 21 nt, RNAi-antisense strand
uccugccaggccucaccuguu

SEQ ID NO: 2983 - DNA, 21 bp, Homo sapiens
aactttgccattgtctatttc

SEQ ID NO: 2984 - RNA, 21 nt, RNAi-sense strand
cuuugccauugucuauuucuu

SEQ ID NO: 2985 - RNA, 21 nt, RNAi-antisense strand
gaaauagacaauggcaaaguu

SEQ ID NO: 2986 - DNA, 21 bp, Homo sapiens
aatctgtttgtggctgtcatc

SEQ ID NO: 2987 - RNA, 21 nt, RNAi-sense strand
ucuguuuguggcugucaucuu

SEQ ID NO: 2988 - RNA, 21 nt, RNAi-antisense strand
gaugacagccacaaacagauu

SEQ ID NO: 2989 - DNA, 21 bp, Homo sapiens
aaacaccttgatgtggtcact

SEQ ID NO: 2990 - RNA, 21 nt, RNAi-sense strand
acaccuugauguggucacuuu

SEQ ID NO: 2991 - RNA, 21 nt, RNAi-antisense strand
agugaccacaucaagguguuu

SEQ ID NO: 2992 - DNA, 21 bp, Homo sapiens
aacaccttgatgtggtcactc

SEQ ID NO: 2993 - RNA, 21 nt, RNAi-sense strand
caccuugauguggucacucuu

SEQ ID NO: 2994 - RNA, 21 nt, RNAi-antisense strand
gagugaccacaucaagguguu

SEQ ID NO: 2995 - DNA, 21 bp, Homo sapiens
aagagattagttgccatgaac

SEQ ID NO: 2996 - RNA, 21 nt, RNAi-sense strand
gagauuaguugccaugaacuu

SEQ ID NO: 2997 - RNA, 21 nt, RNAi-antisense strand
guucauggcaacuaaucucuu

SEQ ID NO: 2998 - DNA, 21 bp, Homo sapiens
aacatgcctctcaacagtgac

SEQ ID NO: 2999 - RNA, 21 nt, RNAi-sense strand
caugccucucaacagugacuu

SEQ ID NO: 3000 - RNA, 21 nt, RNAi-antisense strand
gucacuguugagaggcauguu

SEQ ID NO: 3001 - DNA, 21 bp, Homo sapiens
aacggctcttaagatcaagac

SEQ ID NO: 3002 - RNA, 21 nt, RNAi-sense strand
cggcucuuaagaucaagacuu

SEQ ID NO: 3003 - RNA, 21 nt, RNAi-antisense strand
gucuugaucuuaagagccguu

SEQ ID NO: 3004 - DNA, 21 bp, Homo sapiens
aacctggagcaagctaatgaa

SEQ ID NO: 3005 - RNA, 21 nt, RNAi-sense strand
ccuggagcaagcuaaugaauu

SEQ ID NO: 3006 - RNA, 21 nt, RNAi-antisense strand
uucauuagcuugcuccagguu

SEQ ID NO: 3007 - DNA, 21 bp, Homo sapiens
aaaccagcatgaaattacttg

SEQ ID NO: 3008 - RNA, 21 nt, RNAi-sense strand
accagcaugaaauuacuuguu

SEQ ID NO: 3009 - RNA, 21 nt, RNAi-antisense strand
caaguaauuucaugcugguuu

SEQ ID NO: 3010 - DNA, 21 bp, Homo sapiens
aaccagcatgaaattacttga

SEQ ID NO: 3011 - RNA, 21 nt, RNAi-sense strand
ccagcaugaaauuacuugauu

SEQ ID NO: 3012 - RNA, 21 nt, RNAi-antisense strand
ucaaguaauuucaugcugguu

SEQ ID NO: 3013 - DNA, 21 bp, Homo sapiens
aaattacttgaccaagttgtc

SEQ ID NO: 3014 - RNA, 21 nt, RNAi-sense strand
auuacuugaccaaguugucuu

SEQ ID NO: 3015 - RNA, 21 nt, RNAi-antisense strand
gacaacuuggucaaguaauuu

SEQ ID NO: 3016 - DNA, 21 bp, Homo sapiens
aattacttgaccaagttgtcc

SEQ ID NO: 3017 - RNA, 21 nt, RNAi-sense strand
uuacuugaccaaguuguccuu

SEQ ID NO: 3018 - RNA, 21 nt, RNAi-antisense strand
ggacaacuuggucaaguaauu

SEQ ID NO: 3019 - DNA, 21 bp, Homo sapiens
aagttctatgccactttcctg

SEQ ID NO: 3020 - RNA, 21 nt, RNAi-sense strand
guucuaugccacuuuccuguu

SEQ ID NO: 3021 - RNA, 21 nt, RNAi-antisense strand
caggaaaguggcauagaacuu

SEQ ID NO: 3022 - DNA, 21 bp, Homo sapiens
aattcaagaaacggaaagaac

SEQ ID NO: 3023 - RNA, 21 nt, RNAi-sense strand
uucaagaaacggaaagaacuu

SEQ ID NO: 3024 - RNA, 21 nt, RNAi-antisense strand
guucuuuccguuucuugaauu

SEQ ID NO: 3025 - DNA, 21 bp, Homo sapiens
aagaaacggaaagaacaagga

SEQ ID NO: 3026 - RNA, 21 nt, RNAi-sense strand
gaaacggaaagaacaaggauu

SEQ ID NO: 3027 - RNA, 21 nt, RNAi-antisense strand
uccuuguucuuuccguuucuu

SEQ ID NO: 3028 - DNA, 21 bp, Homo sapiens
aaacggaaagaacaaggactg

SEQ ID NO: 3029 - RNA, 21 nt, RNAi-sense strand
acggaaagaacaaggacuguu

SEQ ID NO: 3030 - RNA, 21 nt, RNAi-antisense strand
caguccuuguucuuuccguuu

SEQ ID NO: 3031 - DNA, 21 bp, Homo sapiens
aacggaaagaacaaggactgg

SEQ ID NO: 3032 - RNA, 21 nt, RNAi-sense strand
cggaaagaacaaggacugguu

SEQ ID NO: 3033 - RNA, 21 nt, RNAi-antisense strand
ccaguccuuguucuuuccguu

SEQ ID NO: 3034 - DNA, 21 bp, Homo sapiens
aaggacactgcatgacattgg

SEQ ID NO: 3035 - RNA, 21 nt, RNAi-sense strand
ggacacugcaugacauugguu

SEQ ID NO: 3036 - RNA, 21 nt, RNAi-antisense strand
ccaaugucaugcaguguccuu

SEQ ID NO: 3037 - DNA, 21 bp, Homo sapiens
aaatccggcgtgctatatcgt

SEQ ID NO: 3038 - RNA, 21 nt, RNAi-sense strand
auccggcgugcuauaucguuu

SEQ ID NO: 3039 - RNA, 21 nt, RNAi-antisense strand
acgauauagcacgccggauuu

SEQ ID NO: 3040 - DNA, 21 bp, Homo sapiens
aatccggcgtgctatatcgtg

SEQ ID NO: 3041 - RNA, 21 nt, RNAi-sense strand
uccggcgugcuauaucguguu

SEQ ID NO: 3042 - RNA, 21 nt, RNAi-antisense strand
cacgauauagcacgccggauu

SEQ ID NO: 3043 - DNA, 21 bp, Homo sapiens
aagatgacgagcctgaggaaa

SEQ ID NO: 3044 - RNA, 21 nt, RNAi-sense strand
gaugacgagccugaggaaauu

SEQ ID NO: 3045 - RNA, 21 nt, RNAi-antisense strand
uuuccucaggcucgucaucuu

SEQ ID NO: 3046 - DNA, 21 bp, Homo sapiens
aaacgagaagaagaagatgat

SEQ ID NO: 3047 - RNA, 21 nt, RNAi-sense strand
acgagaagaagaagaugauuu

SEQ ID NO: 3048 - RNA, 21 nt, RNAi-antisense strand
aucaucuucuucuucucguuu

SEQ ID NO: 3049 - DNA, 21 bp, Homo sapiens
aacgagaagaagaagatgatg

SEQ ID NO: 3050 - RNA, 21 nt, RNAi-sense strand
cgagaagaagaagaugauguu

SEQ ID NO: 3051 - RNA, 21 nt, RNAi-antisense strand
caucaucuucuucuucucguu

SEQ ID NO: 3052 - DNA, 21 bp, Homo sapiens
aagaagaagatgatgtgttca

SEQ ID NO: 3053 - RNA, 21 nt, RNAi-sense strand
gaagaagaugauguguucauu

SEQ ID NO: 3054 - RNA, 21 nt, RNAi-antisense strand
ugaacacaucaucuucuucuu

SEQ ID NO: 3055 - DNA, 21 bp, Homo sapiens
aatagtgataggagagattcc

SEQ ID NO: 3056 - RNA, 21 nt, RNAi-sense strand
uagugauaggagagauuccuu

SEQ ID NO: 3057 - RNA, 21 nt, RNAi-antisense strand
ggaaucucuccuaucacuauu

SEQ ID NO: 3058 - DNA, 21 bp, Homo sapiens
aaaggccttcaattccacctg

SEQ ID NO: 3059 - RNA, 21 nt, RNAi-sense strand
aggccuucaauuccaccuguu

SEQ ID NO: 3060 - RNA, 21 nt, RNAi-antisense strand
cagguggaauugaaggccuuu

SEQ ID NO: 3061 - DNA, 21 bp, Homo sapiens
aaggccttcaattccacctgc

SEQ ID NO: 3062 - RNA, 21 nt, RNAi-sense strand
ggccuucaauuccaccugcuu

SEQ ID NO: 3063 - RNA, 21 nt, RNAi-antisense strand
gcagguggaauugaaggccuu

SEQ ID NO: 3064 - DNA, 21 bp, Homo sapiens
aattccacctgcaagtgatac

SEQ ID NO: 3065 - RNA, 21 nt, RNAi-sense strand
uuccaccugcaagugauacuu

SEQ ID NO: 3066 - RNA, 21 nt, RNAi-antisense strand
guaucacuugcagguggaauu

SEQ ID NO: 3067 - DNA, 21 bp, Homo sapiens
aagtgatactgagaaaccgct

SEQ ID NO: 3068 - RNA, 21 nt, RNAi-sense strand
gugauacugagaaaccgcuuu

SEQ ID NO: 3069 - RNA, 21 nt, RNAi-antisense strand
agcgguuucucaguaucacuu

SEQ ID NO: 3070 - DNA, 21 bp, Homo sapiens
aaaccgctgtttcctccagca

SEQ ID NO: 3071 - RNA, 21 nt, RNAi-sense strand
accgcuguuuccuccagcauu

SEQ ID NO: 3072 - RNA, 21 nt, RNAi-antisense strand
ugcuggaggaaacagcgguuu

SEQ ID NO: 3073 - DNA, 21 bp, Homo sapiens
aaccgctgtttcctccagcag

SEQ ID NO: 3074 - RNA, 21 nt, RNAi-sense strand
ccgcuguuuccuccagcaguu

SEQ ID NO: 3075 - RNA, 21 nt, RNAi-antisense strand
cugcuggaggaaacagcgguu

SEQ ID NO: 3076 - DNA, 21 bp, Homo sapiens
aaattcggtgtgtcataacca

SEQ ID NO: 3077 - RNA, 21 nt, RNAi-sense strand
auucggugugucauaaccauu

SEQ ID NO: 3078 - RNA, 21 nt, RNAi-antisense strand
ugguuaugacacaccgaauuu

SEQ ID NO: 3079 - DNA, 21 bp, Homo sapiens
aattcggtgtgtcataaccat

SEQ ID NO: 3080 - RNA, 21 nt, RNAi-sense strand
uucggugugucauaaccauuu

SEQ ID NO: 3081 - RNA, 21 nt, RNAi-antisense strand
augguuaugacacaccgaauu

SEQ ID NO: 3082 - DNA, 21 bp, Homo sapiens
aaccatcataaccataattcc

SEQ ID NO: 3083 - RNA, 21 nt, RNAi-sense strand
ccaucauaaccauaauuccuu

SEQ ID NO: 3084 - RNA, 21 nt, RNAi-antisense strand
ggaauuaugguuaugaugguu

SEQ ID NO: 3085 - DNA, 21 bp, Homo sapiens
aaccataattccataggaaag

SEQ ID NO: 3086 - RNA, 21 nt, RNAi-sense strand
ccauaauuccauaggaaaguu

SEQ ID NO: 3087 - RNA, 21 nt, RNAi-antisense strand
cuuuccuauggaauuaugguu

SEQ ID NO: 3088 - DNA, 21 bp, Homo sapiens
aattccataggaaagcaagtt

SEQ ID NO: 3089 - RNA, 21 nt, RNAi-sense strand
uuccauaggaaagcaaguuuu

SEQ ID NO: 3090 - RNA, 21 nt, RNAi-antisense strand
aacuugcuuuccuauggaauu

SEQ ID NO: 3091 - DNA, 21 bp, Homo sapiens
aaatgccaatctcaataatgc

SEQ ID NO: 3092 - RNA, 21 nt, RNAi-sense strand
augccaaucucaauaaugcuu

SEQ ID NO: 3093 - RNA, 21 nt, RNAi-antisense strand
gcauuauugagauuggcauuu

SEQ ID NO: 3094 - DNA, 21 bp, Homo sapiens
aatgccaatctcaataatgcc

SEQ ID NO: 3095 - RNA, 21 nt, RNAi-sense strand
ugccaaucucaauaaugccuu

SEQ ID NO: 3096 - RNA, 21 nt, RNAi-antisense strand
ggcauuauugagauuggcauu

SEQ ID NO: 3097 - DNA, 21 bp, Homo sapiens
aatgccaatatgtccaaagct

SEQ ID NO: 3098 - RNA, 21 nt, RNAi-sense strand
ugccaauauguccaaagcuuu

SEQ ID NO: 3099 - RNA, 21 nt, RNAi-antisense strand
agcuuuggacauauuggcauu

SEQ ID NO: 3100 - DNA, 21 bp, Homo sapiens
aaccttgagcatgtgtctgaa

SEQ ID NO: 3101 - RNA, 21 nt, RNAi-sense strand
ccuugagcaugugucugaauu

SEQ ID NO: 3102 - RNA, 21 nt, RNAi-antisense strand
uucagacacaugcucaagguu

SEQ ID NO: 3103 - DNA, 21 bp, Homo sapiens
aaacttacattaggtccgact

SEQ ID NO: 3104 - RNA, 21 nt, RNAi-sense strand
acuuacauuagguccgacuuu

SEQ ID NO: 3105 - RNA, 21 nt, RNAi-antisense strand
agucggaccuaauguaaguuu

SEQ ID NO: 3106 - DNA, 21 bp, Homo sapiens
aacttacattaggtccgactc

SEQ ID NO: 3107 - RNA, 21 nt, RNAi-sense strand
cuuacauuagguccgacucuu

SEQ ID NO: 3108 - RNA, 21 nt, RNAi-antisense strand
gagucggaccuaauguaaguu

SEQ ID NO: 3109 - DNA, 21 bp, Homo sapiens
aatgctacgaggatgacagct

SEQ ID NO: 3110 - RNA, 21 nt, RNAi-sense strand
ugcuacgaggaugacagcuuu

SEQ ID NO: 3111 - RNA, 21 nt, RNAi-antisense strand
agcugucauccucguagcauu

SEQ ID NO: 3112 - DNA, 21 bp, Homo sapiens
aaactatggctactacagcag

SEQ ID NO: 3113 - RNA, 21 nt, RNAi-sense strand
acuauggcuacuacagcaguu

SEQ ID NO: 3114 - RNA, 21 nt, RNAi-antisense strand
cugcuguaguagccauaguuu

SEQ ID NO: 3115 - DNA, 21 bp, Homo sapiens
aactatggctactacagcaga

SEQ ID NO: 3116 - RNA, 21 nt, RNAi-sense strand
cuauggcuacuacagcagauu

SEQ ID NO: 3117 - RNA, 21 nt, RNAi-antisense strand
ucugcuguaguagccauaguu

SEQ ID NO: 3118 - DNA, 21 bp, Homo sapiens
aaacatcgactctgagaggcc

SEQ ID NO: 3119 - RNA, 21 nt, RNAi-sense strand
acaucgacucugagaggccuu

SEQ ID NO: 3120 - RNA, 21 nt, RNAi-antisense strand
ggccucucagagucgauguuu

SEQ ID NO: 3121 - DNA, 21 bp, Homo sapiens
aaggattcttggaggacgatg

SEQ ID NO: 3122 - RNA, 21 nt, RNAi-sense strand
ggauucuuggaggacgauguu

SEQ ID NO: 3123 - RNA, 21 nt, RNAi-antisense strand
caucguccuccaagaauccuu

SEQ ID NO: 3124 - DNA, 21 bp, Homo sapiens
aaggagacgcctactacctcc

SEQ ID NO: 3125 - RNA, 21 nt, RNAi-sense strand
ggagacgccuacuaccuccuu

SEQ ID NO: 3126 - RNA, 21 nt, RNAi-antisense strand
ggagguaguaggcgucuccuu

SEQ ID NO: 3127 - DNA, 21 bp, Homo sapiens
aatgcagcaacagatcatggc

SEQ ID NO: 3128 - RNA, 21 nt, RNAi-sense strand
ugcagcaacagaucauggcuu

SEQ ID NO: 3129 - RNA, 21 nt, RNAi-antisense strand
gccaugaucuguugcugcauu

SEQ ID NO: 3130 - DNA, 21 bp, Homo sapiens
aacagatcatggcagttgccg

SEQ ID NO: 3131 - RNA, 21 nt, RNAi-sense strand
cagaucauggcaguugccguu

SEQ ID NO: 3132 - RNA, 21 nt, RNAi-antisense strand
cggcaacugccaugaucuguu

SEQ ID NO: 3133 - DNA, 21 bp, Homo sapiens
aagtactcaccgagtcactcg

SEQ ID NO: 3134 - RNA, 21 nt, RNAi-sense strand
guacucaccgagucacucguu

SEQ ID NO: 3135 - RNA, 21 nt, RNAi-antisense strand
cgagugacucggugaguacuu

SEQ ID NO: 3136 - DNA, 21 bp, Homo sapiens
aaacagcgacaagcagaggag

SEQ ID NO: 3137 - RNA, 21 nt, RNAi-sense strand
acagcgacaagcagaggaguu

SEQ ID NO: 3138 - RNA, 21 nt, RNAi-antisense strand
cuccucugcuugucgcuguuu

SEQ ID NO: 3139 - DNA, 21 bp, Homo sapiens
aacagcgacaagcagaggagt

SEQ ID NO: 3140 - RNA, 21 nt, RNAi-sense strand
cagcgacaagcagaggaguuu

SEQ ID NO: 3141 - RNA, 21 nt, RNAi-antisense strand
acuccucugcuugucgcuguu

SEQ ID NO: 3142 - DNA, 21 bp, Homo sapiens
aagcagaggagtgcggacagc

SEQ ID NO: 3143 - RNA, 21 nt, RNAi-sense strand
gcagaggagugcggacagcuu

SEQ ID NO: 3144 - RNA, 21 nt, RNAi-antisense strand
gcuguccgcacuccucugcuu

SEQ ID NO: 3145 - DNA, 21 bp, Homo sapiens
aaacacgaaatcgctgatgcc

SEQ ID NO: 3146 - RNA, 21 nt, RNAi-sense strand
acacgaaaucgcugaugccuu

SEQ ID NO: 3147 - RNA, 21 nt, RNAi-antisense strand
ggcaucagcgauuucguguuu

SEQ ID NO: 3148 - DNA, 21 bp, Homo sapiens
aacacgaaatcgctgatgcct

SEQ ID NO: 3149 - RNA, 21 nt, RNAi-sense strand
cacgaaaucgcugaugccuuu

SEQ ID NO: 3150 - RNA, 21 nt, RNAi-antisense strand
aggcaucagcgauuucguguu

SEQ ID NO: 3151 - DNA, 21 bp, Homo sapiens
aaatcgctgatgcctgtgacc

SEQ ID NO: 3152 - RNA, 21 nt, RNAi-sense strand
aucgcugaugccugugaccuu

SEQ ID NO: 3153 - RNA, 21 nt, RNAi-antisense strand
ggucacaggcaucagcgauuu

SEQ ID NO: 3154 - DNA, 21 bp, Homo sapiens
aatcgctgatgcctgtgacct

SEQ ID NO: 3155 - RNA, 21 nt, RNAi-sense strand
ucgcugaugccugugaccuuu

SEQ ID NO: 3156 - RNA, 21 nt, RNAi-antisense strand
aggucacaggcaucagcgauu

SEQ ID NO: 3157 - DNA, 21 bp, Homo sapiens
aaatgatatgcatcaccacct

SEQ ID NO: 3158 - RNA, 21 nt, RNAi-sense strand
augauaugcaucaccaccuuu

SEQ ID NO: 3159 - RNA, 21 nt, RNAi-antisense strand
agguggugaugcauaucauuu

SEQ ID NO: 3160 - DNA, 21 bp, Homo sapiens
aatgatatgcatcaccacctt

SEQ ID NO: 3161 - RNA, 21 nt, RNAi-sense strand
ugauaugcaucaccaccuuuu

SEQ ID NO: 3162 - RNA, 21 nt, RNAi-antisense strand
aagguggugaugcauaucauu

SEQ ID NO: 3163 - DNA, 21 bp, Homo sapiens
aaagtgcctcatagttaggaa

SEQ ID NO: 3164 - RNA, 21 nt, RNAi-sense strand
agugccucauaguuaggaauu

SEQ ID NO: 3165 - RNA, 21 nt, RNAi-antisense strand
uuccuaacuaugaggcacuuu

SEQ ID NO: 3166 - DNA, 21 bp, Homo sapiens
aagtgcctcatagttaggaaa

SEQ ID NO: 3167 - RNA, 21 nt, RNAi-sense strand
gugccucauaguuaggaaauu

SEQ ID NO: 3168 - RNA, 21 nt, RNAi-antisense strand
uuuccuaacuaugaggcacuu

SEQ ID NO: 3169 - DNA, 21 bp, Homo sapiens
aagagatgtcatgcctcaaga

SEQ ID NO: 3170 - RNA, 21 nt, RNAi-sense strand
gagaugucaugccucaagauu

SEQ ID NO: 3171 - RNA, 21 nt, RNAi-antisense strand
ucuugaggcaugacaucucuu

SEQ ID NO: 3172 - DNA, 21 bp, Homo sapiens
aagaaagccataaacctggta

SEQ ID NO: 3173 - RNA, 21 nt, RNAi-sense strand
gaaagccauaaaccugguauu

SEQ ID NO: 3174 - RNA, 21 nt, RNAi-antisense strand
uaccagguuuauggcuuucuu

SEQ ID NO: 3175 - DNA, 21 bp, Homo sapiens
aaagccataaacctggtagga

SEQ ID NO: 3176 - RNA, 21 nt, RNAi-sense strand
agccauaaaccugguaggauu

SEQ ID NO: 3177 - RNA, 21 nt, RNAi-antisense strand
uccuaccagguuuauggcuuu

SEQ ID NO: 3178 - DNA, 21 bp, Homo sapiens
aagccataaacctggtaggaa

SEQ ID NO: 3179 - RNA, 21 nt, RNAi-sense strand
gccauaaaccugguaggaauu

SEQ ID NO: 3180 - RNA, 21 nt, RNAi-antisense strand
uuccuaccagguuuauggcuu

SEQ ID NO: 3181 - DNA, 21 bp, Homo sapiens
aaacctggtaggaacaggtcc

SEQ ID NO: 3182 - RNA, 21 nt, RNAi-sense strand
accugguaggaacagguccuu

SEQ ID NO: 3183 - RNA, 21 nt, RNAi-antisense strand
ggaccuguuccuaccagguuu

SEQ ID NO: 3184 - DNA, 21 bp, Homo sapiens
aagcggttgagcctggcagag

SEQ ID NO: 3185 - RNA, 21 nt, RNAi-sense strand
gcgguugagccuggcagaguu

SEQ ID NO: 3186 - RNA, 21 nt, RNAi-antisense strand
cucugccaggcucaaccgcuu

SEQ ID NO: 3187 - DNA, 21 bp, Homo sapiens
aaagttaaaggtgatgacgat

SEQ ID NO: 3188 - RNA, 21 nt, RNAi-sense strand
aguuaaaggugaugacgauuu

SEQ ID NO: 3189 - RNA, 21 nt, RNAi-antisense strand
aucgucaucaccuuuaacuuu

SEQ ID NO: 3190 - DNA, 21 bp, Homo sapiens
aagttaaaggtgatgacgatc

SEQ ID NO: 3191 - RNA, 21 nt, RNAi-sense strand
guuaaaggugaugacgaucuu

SEQ ID NO: 3192 - RNA, 21 nt, RNAi-antisense strand
gaucgucaucaccuuuaacuu

SEQ ID NO: 3193 - DNA, 21 bp, Homo sapiens
aaaggtgatgacgatcatcac

SEQ ID NO: 3194 - RNA, 21 nt, RNAi-sense strand
aggugaugacgaucaucacuu

SEQ ID NO: 3195 - RNA, 21 nt, RNAi-antisense strand
gugaugaucgucaucaccuuu

SEQ ID NO: 3196 - DNA, 21 bp, Homo sapiens
aaggtgatgacgatcatcaca

SEQ ID NO: 3197 - RNA, 21 nt, RNAi-sense strand
ggugaugacgaucaucacauu

SEQ ID NO: 3198 - RNA, 21 nt, RNAi-antisense strand
ugugaugaucgucaucaccuu

SEQ ID NO: 3199 - DNA, 21 bp, Homo sapiens
aaatacactgcgtcctggttc

SEQ ID NO: 3200 - RNA, 21 nt, RNAi-sense strand
auacacugcguccugguucuu

SEQ ID NO: 3201 - RNA, 21 nt, RNAi-antisense strand
gaaccaggacgcaguguauuu

SEQ ID NO: 3202 - DNA, 21 bp, Homo sapiens
aatacactgcgtcctggttcc

SEQ ID NO: 3203 - RNA, 21 nt, RNAi-sense strand
uacacugcguccugguuccuu

SEQ ID NO: 3204 - RNA, 21 nt, RNAi-antisense strand
ggaaccaggacgcaguguauu

SEQ ID NO: 3205 - DNA, 21 bp, Homo sapiens
cacacagtagtcgctcaataa

SEQ ID NO: 3206 - RNA, 21 nt, RNAi-sense strand
cacaguagucgcucaauaauu

SEQ ID NO: 3207 - RNA, 21 nt, RNAi-antisense strand
uuauugagcgacuacuguguu

SEQ ID NO: 3208 - DNA, 21 bp, Homo sapiens
cacagtagtcgctcaataaat

SEQ ID NO: 3209 - RNA, 21 nt, RNAi-sense strand
caguagucgcucaauaaauuu

SEQ ID NO: 3210 - RNA, 21 nt, RNAi-antisense strand
auuuauugagcgacuacuguu

SEQ ID NO: 3211 - DNA, 21 bp, Homo sapiens
cagtagtcgctcaataaatgt

SEQ ID NO: 3212 - RNA, 21 nt, RNAi-sense strand
guagucgcucaauaaauguuu

SEQ ID NO: 3213 - RNA, 21 nt, RNAi-antisense strand
acauuuauugagcgacuacuu

SEQ ID NO: 3214 - DNA, 21 bp, Homo sapiens
caataaatgttcgtggatgat

SEQ ID NO: 3215 - RNA, 21 nt, RNAi-sense strand
auaaauguucguggaugauuu

SEQ ID NO: 3216 - RNA, 21 nt, RNAi-antisense strand
aucauccacgaacauuuauuu

SEQ ID NO: 3217 - DNA, 21 bp, Homo sapiens
cagcatcaacggcagcagcaa

SEQ ID NO: 3218 - RNA, 21 nt, RNAi-sense strand
gcaucaacggcagcagcaauu

SEQ ID NO: 3219 - RNA, 21 nt, RNAi-antisense strand
uugcugcugccguugaugcuu

SEQ ID NO: 3220 - DNA, 21 bp, Homo sapiens
catcaacggcagcagcaagcg

SEQ ID NO: 3221 - RNA, 21 nt, RNAi-sense strand
ucaacggcagcagcaagcguu

SEQ ID NO: 3222 - RNA, 21 nt, RNAi-antisense strand
cgcuugcugcugccguugauu

SEQ ID NO: 3223 - DNA, 21 bp, Homo sapiens
cacgcgaacgaggcaaactat

SEQ ID NO: 3224 - RNA, 21 nt, RNAi-sense strand
cgcgaacgaggcaaacuauuu

SEQ ID NO: 3225 - RNA, 21 nt, RNAi-antisense strand
auaguuugccucguucgcguu

SEQ ID NO: 3226 - DNA, 21 bp, Homo sapiens
caaactatgcaagaggcacca

SEQ ID NO: 3227 - RNA, 21 nt, RNAi-sense strand
aacuaugcaagaggcaccauu

SEQ ID NO: 3228 - RNA, 21 nt, RNAi-antisense strand
uggugccucuugcauaguuuu

SEQ ID NO: 3229 - DNA, 21 bp, Homo sapiens
caagaggcaccagacttcctc

SEQ ID NO: 3230 - RNA, 21 nt, RNAi-sense strand
agaggcaccagacuuccucuu

SEQ ID NO: 3231 - RNA, 21 nt, RNAi-antisense strand
gaggaagucuggugccucuuu

SEQ ID NO: 3232 - DNA, 21 bp, Homo sapiens
caccagacttcctctttctgg

SEQ ID NO: 3233 - RNA, 21 nt, RNAi-sense strand
ccagacuuccucuuucugguu

SEQ ID NO: 3234 - RNA, 21 nt, RNAi-antisense strand
ccagaaagaggaagucugguu

SEQ ID NO: 3235 - DNA, 21 bp, Homo sapiens
cagacttcctctttctggtga

SEQ ID NO: 3236 - RNA, 21 nt, RNAi-sense strand
gacuuccucuuucuggugauu

SEQ ID NO: 3237 - RNA, 21 nt, RNAi-antisense strand
ucaccagaaagaggaagucuu

SEQ ID NO: 3238 - DNA, 21 bp, Homo sapiens
caacttctcagccgaatagct

SEQ ID NO: 3239 - RNA, 21 nt, RNAi-sense strand
acuucucagccgaauagcuuu

SEQ ID NO: 3240 - RNA, 21 nt, RNAi-antisense strand
agcuauucggcugagaaguuu

SEQ ID NO: 3241 - DNA, 21 bp, Homo sapiens
cagccgaatagctccaagcaa

SEQ ID NO: 3242 - RNA, 21 nt, RNAi-sense strand
gccgaauagcuccaagcaauu

SEQ ID NO: 3243 - RNA, 21 nt, RNAi-antisense strand
uugcuuggagcuauucggcuu

SEQ ID NO: 3244 - DNA, 21 bp, Homo sapiens
caagcaaactgtcctgtcttg

SEQ ID NO: 3245 - RNA, 21 nt, RNAi-sense strand
agcaaacuguccugucuuguu

SEQ ID NO: 3246 - RNA, 21 nt, RNAi-antisense strand
caagacaggacaguuugcuuu

SEQ ID NO: 3247 - DNA, 21 bp, Homo sapiens
caaactgtcctgtcttggcaa

SEQ ID NO: 3248 - RNA, 21 nt, RNAi-sense strand
aacuguccugucuuggcaauu

SEQ ID NO: 3249 - RNA, 21 nt, RNAi-antisense strand
uugccaagacaggacaguuuu

SEQ ID NO: 3250 - DNA, 21 bp, Homo sapiens
caagctgcaatcgatgctgct

SEQ ID NO: 3251 - RNA, 21 nt, RNAi-sense strand
agcugcaaucgaugcugcuuu

SEQ ID NO: 3252 - RNA, 21 nt, RNAi-antisense strand
agcagcaucgauugcagcuuu

SEQ ID NO: 3253 - DNA, 21 bp, Homo sapiens
caatcgatgctgctagacagg

SEQ ID NO: 3254 - RNA, 21 nt, RNAi-sense strand
aucgaugcugcuagacagguu

SEQ ID NO: 3255 - RNA, 21 nt, RNAi-antisense strand
ccugucuagcagcaucgauuu

SEQ ID NO: 3256 - DNA, 21 bp, Homo sapiens
caaactatgagcacctctgca

SEQ ID NO: 3257 - RNA, 21 nt, RNAi-sense strand
aacuaugagcaccucugcauu

SEQ ID NO: 3258 - RNA, 21 nt, RNAi-antisense strand
ugcagaggugcucauaguuuu

SEQ ID NO: 3259 - DNA, 21 bp, Homo sapiens
cagcaatacgccaagagcaaa

SEQ ID NO: 3260 - RNA, 21 nt, RNAi-sense strand
gcaauacgccaagagcaaauu

SEQ ID NO: 3261 - RNA, 21 nt, RNAi-antisense strand
uuugcucuuggcguauugcuu

SEQ ID NO: 3262 - DNA, 21 bp, Homo sapiens
catccgaagagcctgcattag

SEQ ID NO: 3263 - RNA, 21 nt, RNAi-sense strand
uccgaagagccugcauuaguu

SEQ ID NO: 3264 - RNA, 21 nt, RNAi-antisense strand
cuaaugcaggcucuucggauu

SEQ ID NO: 3265 - DNA, 21 bp, Homo sapiens
cattagtatagtggaatggaa

SEQ ID NO: 3266 - RNA, 21 nt, RNAi-sense strand
uuaguauaguggaauggaauu

SEQ ID NO: 3267 - RNA, 21 nt, RNAi-antisense strand
uuccauuccacuauacuaauu

SEQ ID NO: 3268 - DNA, 21 bp, Homo sapiens
caattgtgtggccttagctat

SEQ ID NO: 3269 - RNA, 21 nt, RNAi-sense strand
auuguguggccuuagcuauuu

SEQ ID NO: 3270 - RNA, 21 nt, RNAi-antisense strand
auagcuaaggccacacaauuu

SEQ ID NO: 3271 - DNA, 21 bp, Homo sapiens
catcctaatgcttatgttagg

SEQ ID NO: 3272 - RNA, 21 nt, RNAi-sense strand
uccuaaugcuuauguuagguu

SEQ ID NO: 3273 - RNA, 21 nt, RNAi-antisense strand
ccuaacauaagcauuaggauu

SEQ ID NO: 3274 - DNA, 21 bp, Homo sapiens
cactcaagcggcaaatctgga

SEQ ID NO: 3275 - RNA, 21 nt, RNAi-sense strand
cucaagcggcaaaucuggauu

SEQ ID NO: 3276 - RNA, 21 nt, RNAi-antisense strand
uccagauuugccgcuugaguu

SEQ ID NO: 3277 - DNA, 21 bp, Homo sapiens
caagcggcaaatctggaggct

SEQ ID NO: 3278 - RNA, 21 nt, RNAi-sense strand
agcggcaaaucuggaggcuuu

SEQ ID NO: 3279 - RNA, 21 nt, RNAi-antisense strand
agccuccagauuugccgcuuu

SEQ ID NO: 3280 - DNA, 21 bp, Homo sapiens
caaatctggaggctttgatgt

SEQ ID NO: 3281 - RNA, 21 nt, RNAi-sense strand
aaucuggaggcuuugauguuu

SEQ ID NO: 3282 - RNA, 21 nt, RNAi-antisense strand
acaucaaagccuccagauuuu

SEQ ID NO: 3283 - DNA, 21 bp, Homo sapiens
cagtttacaagttgtcctgaa

SEQ ID NO: 3284 - RNA, 21 nt, RNAi-sense strand
guuuacaaguuguccugaauu

SEQ ID NO: 3285 - RNA, 21 nt, RNAi-antisense strand
uucaggacaacuuguaaacuu

SEQ ID NO: 3286 - DNA, 21 bp, Homo sapiens
caagttgtcctgaactccatt

SEQ ID NO: 3287 - RNA, 21 nt, RNAi-sense strand
aguuguccugaacuccauuuu

SEQ ID NO: 3288 - RNA, 21 nt, RNAi-antisense strand
aauggaguucaggacaacuuu

SEQ ID NO: 3289 - DNA, 21 bp, Homo sapiens
cagatatcgtagctgaagagg

SEQ ID NO: 3290 - RNA, 21 nt, RNAi-sense strand
gauaucguagcugaagagguu

SEQ ID NO: 3291 - RNA, 21 nt, RNAi-antisense strand
ccucuucagcuacgauaucuu

SEQ ID NO: 3292 - DNA, 21 bp, Homo sapiens
cagctccatgtgcgttctcag

SEQ ID NO: 3293 - RNA, 21 nt, RNAi-sense strand
gcuccaugugcguucucaguu

SEQ ID NO: 3294 - RNA, 21 nt, RNAi-antisense strand
cugagaacgcacauggagcuu

SEQ ID NO: 3295 - DNA, 21 bp, Homo sapiens
cagtgtactgccaatggcacg

SEQ ID NO: 3296 - RNA, 21 nt, RNAi-sense strand
guguacugccaauggcacguu

SEQ ID NO: 3297 - RNA, 21 nt, RNAi-antisense strand
cgugccauuggcaguacacuu

SEQ ID NO: 3298 - DNA, 21 bp, Homo sapiens
caatggcacggaatgtaggag

SEQ ID NO: 3299 - RNA, 21 nt, RNAi-sense strand
auggcacggaauguaggaguu

SEQ ID NO: 3300 - RNA, 21 nt, RNAi-antisense strand
cuccuacauuccgugccauuu

SEQ ID NO: 3301 - DNA, 21 bp, Homo sapiens
cacggaatgtaggagtggctg

SEQ ID NO: 3302 - RNA, 21 nt, RNAi-sense strand
cggaauguaggaguggcuguu

SEQ ID NO: 3303 - RNA, 21 nt, RNAi-antisense strand
cagccacuccuacauuccguu

SEQ ID NO: 3304 - DNA, 21 bp, Homo sapiens
catcaccaactttgataactt

SEQ ID NO: 3305 - RNA, 21 nt, RNAi-sense strand
ucaccaacuuugauaacuuuu

SEQ ID NO: 3306 - RNA, 21 nt, RNAi-antisense strand
aaguuaucaaaguuggugauu

SEQ ID NO: 3307 - DNA, 21 bp, Homo sapiens
caccaactttgataactttgc

SEQ ID NO: 3308 - RNA, 21 nt, RNAi-sense strand
ccaacuuugauaacuuugcuu

SEQ ID NO: 3309 - RNA, 21 nt, RNAi-antisense strand
gcaaaguuaucaaaguugguu

SEQ ID NO: 3310 - DNA, 21 bp, Homo sapiens
caactttgataactttgcctt

SEQ ID NO: 3311 - RNA, 21 nt, RNAi-sense strand
acuuugauaacuuugccuuuu

SEQ ID NO: 3312 - RNA, 21 nt, RNAi-antisense strand
aaggcaaaguuaucaaaguuu

SEQ ID NO: 3313 - DNA, 21 bp, Homo sapiens
catgcttactgtgtttcagtg

SEQ ID NO: 3314 - RNA, 21 nt, RNAi-sense strand
ugcuuacuguguuucaguguu

SEQ ID NO: 3315 - RNA, 21 nt, RNAi-antisense strand
cacugaaacacaguaagcauu

SEQ ID NO: 3316 - DNA, 21 bp, Homo sapiens
caaaggaaagagagaaggcaa

SEQ ID NO: 3317 - RNA, 21 nt, RNAi-sense strand
aaggaaagagagaaggcaauu

SEQ ID NO: 3318 - RNA, 21 nt, RNAi-antisense strand
uugccuucucucuuuccuuuu

SEQ ID NO: 3319 - DNA, 21 bp, Homo sapiens
cagcagctggaggaggatcta

SEQ ID NO: 3320 - RNA, 21 nt, RNAi-sense strand
gcagcuggaggaggaucuauu

SEQ ID NO: 3321 - RNA, 21 nt, RNAi-antisense strand
uagauccuccuccagcugcuu

SEQ ID NO: 3322 - DNA, 21 bp, Homo sapiens
cagctggaggaggatctaaag

SEQ ID NO: 3323 - RNA, 21 nt, RNAi-sense strand
gcuggaggaggaucuaaaguu

SEQ ID NO: 3324 - RNA, 21 nt, RNAi-antisense strand
cuuuagauccuccuccagcuu

SEQ ID NO: 3325 - DNA, 21 bp, Homo sapiens
caagctgaggacatcgatccg

SEQ ID NO: 3326 - RNA, 21 nt, RNAi-sense strand
agcugaggacaucgauccguu

SEQ ID NO: 3327 - RNA, 21 nt, RNAi-antisense strand
cggaucgauguccucagcuuu

SEQ ID NO: 3328 - DNA, 21 bp, Homo sapiens
catcgatccggagaatgagga

SEQ ID NO: 3329 - RNA, 21 nt, RNAi-sense strand
ucgauccggagaaugaggauu

SEQ ID NO: 3330 - RNA, 21 nt, RNAi-antisense strand
uccucauucuccggaucgauu

SEQ ID NO: 3331 - DNA, 21 bp, Homo sapiens
caaacgaaatactagcatgcc

SEQ ID NO: 3332 - RNA, 21 nt, RNAi-sense strand
aacgaaauacuagcaugccuu

SEQ ID NO: 3333 - RNA, 21 nt, RNAi-antisense strand
ggcaugcuaguauuucguuuu

SEQ ID NO: 3334 - DNA, 21 bp, Homo sapiens
caccagcgagactgagtctgt

SEQ ID NO: 3335 - RNA, 21 nt, RNAi-sense strand
ccagcgagacugagucuguuu

SEQ ID NO: 3336 - RNA, 21 nt, RNAi-antisense strand
acagacucagucucgcugguu

SEQ ID NO: 3337 - DNA, 21 bp, Homo sapiens
cagcgagactgagtctgtgaa

SEQ ID NO: 3338 - RNA, 21 nt, RNAi-sense strand
gcgagacugagucugugaauu

SEQ ID NO: 3339 - RNA, 21 nt, RNAi-antisense strand
uucacagacucagucucgcuu

SEQ ID NO: 3340 - DNA, 21 bp, Homo sapiens
cacagagaacgtcagcggtga

SEQ ID NO: 3341 - RNA, 21 nt, RNAi-sense strand
cagagaacgucagcggugauu

SEQ ID NO: 3342 - RNA, 21 nt, RNAi-antisense strand
ucaccgcugacguucucuguu

SEQ ID NO: 3343 - DNA, 21 bp, Homo sapiens
cagagaacgtcagcggtgaag

SEQ ID NO: 3344 - RNA, 21 nt, RNAi-sense strand
gagaacgucagcggugaaguu

SEQ ID NO: 3345 - RNA, 21 nt, RNAi-antisense strand
cuucaccgcugacguucucuu

SEQ ID NO: 3346 - DNA, 21 bp, Homo sapiens
caccttaaccatttcctctga

SEQ ID NO: 3347 - RNA, 21 nt, RNAi-sense strand
ccuuaaccauuuccucugauu

SEQ ID NO: 3348 - RNA, 21 nt, RNAi-antisense strand
ucagaggaaaugguuaagguu

SEQ ID NO: 3349 - DNA, 21 bp, Homo sapiens
catttcctctgagcactacaa

SEQ ID NO: 3350 - RNA, 21 nt, RNAi-sense strand
uuuccucugagcacuacaauu

SEQ ID NO: 3351 - RNA, 21 nt, RNAi-antisense strand
uuguagugcucagaggaaauu

SEQ ID NO: 3352 - DNA, 21 bp, Homo sapiens
cactacaatcagccagattgg

SEQ ID NO: 3353 - RNA, 21 nt, RNAi-sense strand
cuacaaucagccagauugguu

SEQ ID NO: 3354 - RNA, 21 nt, RNAi-antisense strand
ccaaucuggcugauuguaguu

SEQ ID NO: 3355 - DNA, 21 bp, Homo sapiens
caatcagccagattggttgac

SEQ ID NO: 3356 - RNA, 21 nt, RNAi-sense strand
aucagccagauugguugacuu

SEQ ID NO: 3357 - RNA, 21 nt, RNAi-antisense strand
gucaaccaaucuggcugauuu

SEQ ID NO: 3358 - DNA, 21 bp, Homo sapiens
cagccagattggttgacacag

SEQ ID NO: 3359 - RNA, 21 nt, RNAi-sense strand
gccagauugguugacacaguu

SEQ ID NO: 3360 - RNA, 21 nt, RNAi-antisense strand
cugugucaaccaaucuggcuu

SEQ ID NO: 3361 - DNA, 21 bp, Homo sapiens
cagattggttgacacagattc

SEQ ID NO: 3362 - RNA, 21 nt, RNAi-sense strand
gauugguugacacagauucuu

SEQ ID NO: 3363 - RNA, 21 nt, RNAi-antisense strand
gaaucugugucaaccaaucuu

SEQ ID NO: 3364 - DNA, 21 bp, Homo sapiens
cacagattcaagatattgcca

SEQ ID NO: 3365 - RNA, 21 nt, RNAi-sense strand
cagauucaagauauugccauu

SEQ ID NO: 3366 - RNA, 21 nt, RNAi-antisense strand
uggcaauaucuugaaucuguu

SEQ ID NO: 3367 - DNA, 21 bp, Homo sapiens
cagattcaagatattgccaac

SEQ ID NO: 3368 - RNA, 21 nt, RNAi-sense strand
gauucaagauauugccaacuu

SEQ ID NO: 3369 - RNA, 21 nt, RNAi-antisense strand
guuggcaauaucuugaaucuu

SEQ ID NO: 3370 - DNA, 21 bp, Homo sapiens
caagatattgccaacaaagtc

SEQ ID NO: 3371 - RNA, 21 nt, RNAi-sense strand
agauauugccaacaaagucuu

SEQ ID NO: 3372 - RNA, 21 nt, RNAi-antisense strand
gacuuuguuggcaauaucuuu

SEQ ID NO: 3373 - DNA, 21 bp, Homo sapiens
caacaaagtcctcttggctct

SEQ ID NO: 3374 - RNA, 21 nt, RNAi-sense strand
acaaaguccucuuggcucuuu

SEQ ID NO: 3375 - RNA, 21 nt, RNAi-antisense strand
agagccaagaggacuuuguuu

SEQ ID NO: 3376 - DNA, 21 bp, Homo sapiens
caaagtcctcttggctctgtt

SEQ ID NO: 3377 - RNA, 21 nt, RNAi-sense strand
aaguccucuuggcucuguuuu

SEQ ID NO: 3378 - RNA, 21 nt, RNAi-antisense strand
aacagagccaagaggacuuuu

SEQ ID NO: 3379 - DNA, 21 bp, Homo sapiens
cacctgcgagatgctggtaaa

SEQ ID NO: 3380 - RNA, 21 nt, RNAi-sense strand
ccugcgagaugcugguaaauu

SEQ ID NO: 3381 - RNA, 21 nt, RNAi-antisense strand
uuuaccagcaucucgcagguu

SEQ ID NO: 3382 - DNA, 21 bp, Homo sapiens
caagcatatttcgtctctctt

SEQ ID NO: 3383 - RNA, 21 nt, RNAi-sense strand
agcauauuucgucucucuuuu

SEQ ID NO: 3384 - RNA, 21 nt, RNAi-antisense strand
aagagagacgaaauaugcuuu

SEQ ID NO: 3385 - DNA, 21 bp, Homo sapiens
caaccggtttgattgcttcgt

SEQ ID NO: 3386 - RNA, 21 nt, RNAi-sense strand
accgguuugauugcuucguuu

SEQ ID NO: 3387 - RNA, 21 nt, RNAi-antisense strand
acgaagcaaucaaaccgguuu

SEQ ID NO: 3388 - DNA, 21 bp, Homo sapiens
cactgagacgatcctggtgga

SEQ ID NO: 3389 - RNA, 21 nt, RNAi-sense strand
cugagacgauccugguggauu

SEQ ID NO: 3390 - RNA, 21 nt, RNAi-antisense strand
uccaccaggaucgucucaguu

SEQ ID NO: 3391 - DNA, 21 bp, Homo sapiens
caaagtgaccaggcactggac

SEQ ID NO: 3392 - RNA, 21 nt, RNAi-sense strand
aagugaccaggcacuggacuu

SEQ ID NO: 3393 - RNA, 21 nt, RNAi-antisense strand
guccagugccuggucacuuuu

SEQ ID NO: 3394 - DNA, 21 bp, Homo sapiens
caacttagtggcatccttatt

SEQ ID NO: 3395 - RNA, 21 nt, RNAi-sense strand
acuuaguggcauccuuauuuu

SEQ ID NO: 3396 - RNA, 21 nt, RNAi-antisense strand
aauaaggaugccacuaaguuu

SEQ ID NO: 3397 - DNA, 21 bp, Homo sapiens
catccttattaaactccatga

SEQ ID NO: 3398 - RNA, 21 nt, RNAi-sense strand
uccuuauuaaacuccaugauu

SEQ ID NO: 3399 - RNA, 21 nt, RNAi-antisense strand
ucauggaguuuaauaaggauu

SEQ ID NO: 3400 - DNA, 21 bp, Homo sapiens
catgaagtccatcgcttcgct

SEQ ID NO: 3401 - RNA, 21 nt, RNAi-sense strand
ugaaguccaucgcuucgcuuu

SEQ ID NO: 3402 - RNA, 21 nt, RNAi-antisense strand
agcgaagcgauggacuucauu

SEQ ID NO: 3403 - DNA, 21 bp, Homo sapiens
catcgcttcgctgttgcttct

SEQ ID NO: 3404 - RNA, 21 nt, RNAi-sense strand
ucgcuucgcuguugcuucuuu

SEQ ID NO: 3405 - RNA, 21 nt, RNAi-antisense strand
agaagcaacagcgaagcgauu

SEQ ID NO: 3406 - DNA, 21 bp, Homo sapiens
cagctgtttggcggcaagttt

SEQ ID NO: 3407 - RNA, 21 nt, RNAi-sense strand
gcuguuuggcggcaaguuuuu

SEQ ID NO: 3408 - RNA, 21 nt, RNAi-antisense strand
aaacuugccgccaaacagcuu

SEQ ID NO: 3409 - DNA, 21 bp, Homo sapiens
caaaccaagcggagcaccttt

SEQ ID NO: 3410 - RNA, 21 nt, RNAi-sense strand
aaccaagcggagcaccuuuuu

SEQ ID NO: 3411 - RNA, 21 nt, RNAi-antisense strand
aaaggugcuccgcuugguuuu

SEQ ID NO: 3412 - DNA, 21 bp, Homo sapiens
caagcggagcacctttgacaa

SEQ ID NO: 3413 - RNA, 21 nt, RNAi-sense strand
agcggagcaccuuugacaauu

SEQ ID NO: 3414 - RNA, 21 nt, RNAi-antisense strand
uugucaaaggugcuccgcuuu

SEQ ID NO: 3415 - DNA, 21 bp, Homo sapiens
caagcacttctcacagtgttc

SEQ ID NO: 3416 - RNA, 21 nt, RNAi-sense strand
agcacuucucacaguguucuu

SEQ ID NO: 3417 - RNA, 21 nt, RNAi-antisense strand
gaacacugugagaagugcuuu

SEQ ID NO: 3418 - DNA, 21 bp, Homo sapiens
cacttctcacagtgttccaga

SEQ ID NO: 3419 - RNA, 21 nt, RNAi-sense strand
cuucucacaguguuccagauu

SEQ ID NO: 3420 - RNA, 21 nt, RNAi-antisense strand
ucuggaacacugugagaaguu

SEQ ID NO: 3421 - DNA, 21 bp, Homo sapiens
cacagtgttccagatcctgac

SEQ ID NO: 3422 - RNA, 21 nt, RNAi-sense strand
caguguuccagauccugacuu

SEQ ID NO: 3423 - RNA, 21 nt, RNAi-antisense strand
gucaggaucuggaacacuguu

SEQ ID NO: 3424 - DNA, 21 bp, Homo sapiens
cagtgttccagatcctgacag

SEQ ID NO: 3425 - RNA, 21 nt, RNAi-sense strand
guguuccagauccugacaguu

SEQ ID NO: 3426 - RNA, 21 nt, RNAi-antisense strand
cugucaggaucuggaacacuu

SEQ ID NO: 3427 - DNA, 21 bp, Homo sapiens
cagatcctgacaggcgaagac

SEQ ID NO: 3428 - RNA, 21 nt, RNAi-sense strand
gauccugacaggcgaagacuu

SEQ ID NO: 3429 - RNA, 21 nt, RNAi-antisense strand
gucuucgccugucaggaucuu

SEQ ID NO: 3430 - DNA, 21 bp, Homo sapiens
caggcgaagactggaatgctg

SEQ ID NO: 3431 - RNA, 21 nt, RNAi-sense strand
ggcgaagacuggaaugcuguu

SEQ ID NO: 3432 - RNA, 21 nt, RNAi-antisense strand
cagcauuccagucuucgccuu

SEQ ID NO: 3433 - DNA, 21 bp, Homo sapiens
catcctcttcaggaatgatcg

SEQ ID NO: 3434 - RNA, 21 nt, RNAi-sense strand
uccucuucaggaaugaucguu

SEQ ID NO: 3435 - RNA, 21 nt, RNAi-antisense strand
cgaucauuccugaagaggauu

SEQ ID NO: 3436 - DNA, 21 bp, Homo sapiens
caggaatgatcgtctgcatct

SEQ ID NO: 3437 - RNA, 21 nt, RNAi-sense strand
ggaaugaucgucugcaucuuu

SEQ ID NO: 3438 - RNA, 21 nt, RNAi-antisense strand
agaugcagacgaucauuccuu

SEQ ID NO: 3439 - DNA, 21 bp, Homo sapiens
catctacttcatcatcctctt

SEQ ID NO: 3440 - RNA, 21 nt, RNAi-sense strand
ucuacuucaucauccucuuuu

SEQ ID NO: 3441 - RNA, 21 nt, RNAi-antisense strand
aagaggaugaugaaguagauu

SEQ ID NO: 3442 - DNA, 21 bp, Homo sapiens
catcatcctcttcatttgtgg

SEQ ID NO: 3443 - RNA, 21 nt, RNAi-sense strand
ucauccucuucauuugugguu

SEQ ID NO: 3444 - RNA, 21 nt, RNAi-antisense strand
ccacaaaugaagaggaugauu

SEQ ID NO: 3445 - DNA, 21 bp, Homo sapiens
catcctcttcatttgtggtaa

SEQ ID NO: 3446 - RNA, 21 nt, RNAi-sense strand
uccucuucauuugugguaauu

SEQ ID NO: 3447 - RNA, 21 nt, RNAi-antisense strand
uuaccacaaaugaagaggauu

SEQ ID NO: 3448 - DNA, 21 bp, Homo sapiens
catcgctgtagacaatttggc

SEQ ID NO: 3449 - RNA, 21 nt, RNAi-sense strand
ucgcuguagacaauuuggcuu

SEQ ID NO: 3450 - RNA, 21 nt, RNAi-antisense strand
gccaaauugucuacagcgauu

SEQ ID NO: 3451 - DNA, 21 bp, Homo sapiens
caatttggctgatgctgaaag

SEQ ID NO: 3452 - RNA, 21 nt, RNAi-sense strand
auuuggcugaugcugaaaguu

SEQ ID NO: 3453 - RNA, 21 nt, RNAi-antisense strand
cuuucagcaucagccaaauuu

SEQ ID NO: 3454 - DNA, 21 bp, Homo sapiens
cactgctcagaaagaagaagc

SEQ ID NO: 3455 - RNA, 21 nt, RNAi-sense strand
cugcucagaaagaagaagcuu

SEQ ID NO: 3456 - RNA, 21 nt, RNAi-antisense strand
gcuucuucuuucugagcaguu

SEQ ID NO: 3457 - DNA, 21 bp, Homo sapiens
cagaaagaagaagcggaagaa

SEQ ID NO: 3458 - RNA, 21 nt, RNAi-sense strand
gaaagaagaagcggaagaauu

SEQ ID NO: 3459 - RNA, 21 nt, RNAi-antisense strand
uucuuccgcuucuucuuucuu

SEQ ID NO: 3460 - DNA, 21 bp, Homo sapiens
caacaaaccagaagtcaacca

SEQ ID NO: 3461 - RNA, 21 nt, RNAi-sense strand
acaaaccagaagucaaccauu

SEQ ID NO: 3462 - RNA, 21 nt, RNAi-antisense strand
ugguugacuucugguuuguuu

SEQ ID NO: 3463 - DNA, 21 bp, Homo sapiens
caaaccagaagtcaaccagat

SEQ ID NO: 3464 - RNA, 21 nt, RNAi-sense strand
aaccagaagucaaccagauuu

SEQ ID NO: 3465 - RNA, 21 nt, RNAi-antisense strand
aucugguugacuucugguuuu

SEQ ID NO: 3466 - DNA, 21 bp, Homo sapiens
cagaagtcaaccagatagcca

SEQ ID NO: 3467 - RNA, 21 nt, RNAi-sense strand
gaagucaaccagauagccauu

SEQ ID NO: 3468 - RNA, 21 nt, RNAi-antisense strand
uggcuaucugguugacuucuu

SEQ ID NO: 3469 - DNA, 21 bp, Homo sapiens
caaccagatagccaacagtga

SEQ ID NO: 3470 - RNA, 21 nt, RNAi-sense strand
accagauagccaacagugauu

SEQ ID NO: 3471 - RNA, 21 nt, RNAi-antisense strand
ucacuguuggcuaucugguuu

SEQ ID NO: 3472 - DNA, 21 bp, Homo sapiens
cagatagccaacagtgacaac

SEQ ID NO: 3473 - RNA, 21 nt, RNAi-sense strand
gauagccaacagugacaacuu

SEQ ID NO: 3474 - RNA, 21 nt, RNAi-antisense strand
guugucacuguuggcuaucuu

SEQ ID NO: 3475 - DNA, 21 bp, Homo sapiens
caacagtgacaacaaggttac

SEQ ID NO: 3476 - RNA, 21 nt, RNAi-sense strand
acagugacaacaagguuacuu

SEQ ID NO: 3477 - RNA, 21 nt, RNAi-antisense strand
guaaccuuguugucacuguuu

SEQ ID NO: 3478 - DNA, 21 bp, Homo sapiens
cagtgacaacaaggttacaat

SEQ ID NO: 3479 - RNA, 21 nt, RNAi-sense strand
gugacaacaagguuacaauuu

SEQ ID NO: 3480 - RNA, 21 nt, RNAi-antisense strand
auuguaaccuuguugucacuu

SEQ ID NO: 3481 - DNA, 21 bp, Homo sapiens
caacaaggttacaattgatga

SEQ ID NO: 3482 - RNA, 21 nt, RNAi-sense strand
acaagguuacaauugaugauu

SEQ ID NO: 3483 - RNA, 21 nt, RNAi-antisense strand
ucaucaauuguaaccuuguuu

SEQ ID NO: 3484 - DNA, 21 bp, Homo sapiens
caaggttacaattgatgacta

SEQ ID NO: 3485 - RNA, 21 nt, RNAi-sense strand
agguuacaauugaugacuauu

SEQ ID NO: 3486 - RNA, 21 nt, RNAi-antisense strand
uagucaucaauuguaaccuuu

SEQ ID NO: 3487 - DNA, 21 bp, Homo sapiens
caattgatgactatagagaag

SEQ ID NO: 3488 - RNA, 21 nt, RNAi-sense strand
auugaugacuauagagaaguu

SEQ ID NO: 3489 - RNA, 21 nt, RNAi-antisense strand
cuucucuauagucaucaauuu

SEQ ID NO: 3490 - DNA, 21 bp, Homo sapiens
cacaagctcatcaaccaccac

SEQ ID NO: 3491 - RNA, 21 nt, RNAi-sense strand
caagcucaucaaccaccacuu

SEQ ID NO: 3492 - RNA, 21 nt, RNAi-antisense strand
guggugguugaugagcuuguu

SEQ ID NO: 3493 - DNA, 21 bp, Homo sapiens
caagctcatcaaccaccacat

SEQ ID NO: 3494 - RNA, 21 nt, RNAi-sense strand
agcucaucaaccaccacauuu

SEQ ID NO: 3495 - RNA, 21 nt, RNAi-antisense strand
auguggugguugaugagcuuu

SEQ ID NO: 3496 - DNA, 21 bp, Homo sapiens
catcaaccaccacatcttcac

SEQ ID NO: 3497 - RNA, 21 nt, RNAi-sense strand
ucaaccaccacaucuucacuu

SEQ ID NO: 3498 - RNA, 21 nt, RNAi-antisense strand
gugaagauguggugguugauu

SEQ ID NO: 3499 - DNA, 21 bp, Homo sapiens
caaccaccacatcttcaccaa

SEQ ID NO: 3500 - RNA, 21 nt, RNAi-sense strand
accaccacaucuucaccaauu

SEQ ID NO: 3501 - RNA, 21 nt, RNAi-antisense strand
uuggugaagauguggugguuu

SEQ ID NO: 3502 - DNA, 21 bp, Homo sapiens
caccacatcttcaccaacctc

SEQ ID NO: 3503 - RNA, 21 nt, RNAi-sense strand
ccacaucuucaccaaccucuu

SEQ ID NO: 3504 - RNA, 21 nt, RNAi-antisense strand
gagguuggugaagaugugguu

SEQ ID NO: 3505 - DNA, 21 bp, Homo sapiens
cacatcttcaccaacctcatc

SEQ ID NO: 3506 - RNA, 21 nt, RNAi-sense strand
caucuucaccaaccucaucuu

SEQ ID NO: 3507 - RNA, 21 nt, RNAi-antisense strand
gaugagguuggugaagauguu

SEQ ID NO: 3508 - DNA, 21 bp, Homo sapiens
catcttcaccaacctcatcct

SEQ ID NO: 3509 - RNA, 21 nt, RNAi-sense strand
ucuucaccaaccucauccuuu

SEQ ID NO: 3510 - RNA, 21 nt, RNAi-antisense strand
aggaugagguuggugaagauu

SEQ ID NO: 3511 - DNA, 21 bp, Homo sapiens
caccaacctcatccttgtctt

SEQ ID NO: 3512 - RNA, 21 nt, RNAi-sense strand
ccaaccucauccuugucuuuu

SEQ ID NO: 3513 - RNA, 21 nt, RNAi-antisense strand
aagacaaggaugagguugguu

SEQ ID NO: 3514 - DNA, 21 bp, Homo sapiens
caacctcatccttgtcttcat

SEQ ID NO: 3515 - RNA, 21 nt, RNAi-sense strand
accucauccuugucuucauuu

SEQ ID NO: 3516 - RNA, 21 nt, RNAi-antisense strand
augaagacaaggaugagguuu

SEQ ID NO: 3517 - DNA, 21 bp, Homo sapiens
catccttgtcttcatcatgct

SEQ ID NO: 3518 - RNA, 21 nt, RNAi-sense strand
uccuugucuucaucaugcuuu

SEQ ID NO: 3519 - RNA, 21 nt, RNAi-antisense strand
agcaugaugaagacaaggauu

SEQ ID NO: 3520 - DNA, 21 bp, Homo sapiens
catcatgctgagcagcgctgc

SEQ ID NO: 3521 - RNA, 21 nt, RNAi-sense strand
ucaugcugagcagcgcugcuu

SEQ ID NO: 3522 - RNA, 21 nt, RNAi-antisense strand
gcagcgcugcucagcaugauu

SEQ ID NO: 3523 - DNA, 21 bp, Homo sapiens
cagccactccttccggaacac

SEQ ID NO: 3524 - RNA, 21 nt, RNAi-sense strand
gccacuccuuccggaacacuu

SEQ ID NO: 3525 - RNA, 21 nt, RNAi-antisense strand
guguuccggaaggaguggcuu

SEQ ID NO: 3526 - DNA, 21 bp, Homo sapiens
cactccttccggaacacgata

SEQ ID NO: 3527 - RNA, 21 nt, RNAi-sense strand
cuccuuccggaacacgauauu

SEQ ID NO: 3528 - RNA, 21 nt, RNAi-antisense strand
uaucguguuccggaaggaguu

SEQ ID NO: 3529 - DNA, 21 bp, Homo sapiens
cacagccatctttactgttga

SEQ ID NO: 3530 - RNA, 21 nt, RNAi-sense strand
cagccaucuuuacuguugauu

SEQ ID NO: 3531 - RNA, 21 nt, RNAi-antisense strand
ucaacaguaaagauggcuguu

SEQ ID NO: 3532 - DNA, 21 bp, Homo sapiens
cagccatctttactgttgaga

SEQ ID NO: 3533 - RNA, 21 nt, RNAi-sense strand
gccaucuuuacuguugagauu

SEQ ID NO: 3534 - RNA, 21 nt, RNAi-antisense strand
ucucaacaguaaagauggcuu

SEQ ID NO: 3535 - DNA, 21 bp, Homo sapiens
catctttactgttgagatcct

SEQ ID NO: 3536 - RNA, 21 nt, RNAi-sense strand
ucuuuacuguugagauccuuu

SEQ ID NO: 3537 - RNA, 21 nt, RNAi-antisense strand
aggaucucaacaguaaagauu

SEQ ID NO: 3538 - DNA, 21 bp, Homo sapiens
caggaactacttcaatttgct

SEQ ID NO: 3539 - RNA, 21 nt, RNAi-sense strand
ggaacuacuucaauuugcuuu

SEQ ID NO: 3540 - RNA, 21 nt, RNAi-antisense strand
agcaaauugaaguaguuccuu

SEQ ID NO: 3541 - DNA, 21 bp, Homo sapiens
caatttgctggatatgctggt

SEQ ID NO: 3542 - RNA, 21 nt, RNAi-sense strand
auuugcuggauaugcugguuu

SEQ ID NO: 3543 - RNA, 21 nt, RNAi-antisense strand
accagcauauccagcaaauuu

SEQ ID NO: 3544 - DNA, 21 bp, Homo sapiens
caatccagtgccatctccgtt

SEQ ID NO: 3545 - RNA, 21 nt, RNAi-sense strand
auccagugccaucuccguuuu

SEQ ID NO: 3546 - RNA, 21 nt, RNAi-antisense strand
aacggagauggcacuggauuu

SEQ ID NO: 3547 - DNA, 21 bp, Homo sapiens
cagtgccatctccgttgtgaa

SEQ ID NO: 3548 - RNA, 21 nt, RNAi-sense strand
gugccaucuccguugugaauu

SEQ ID NO: 3549 - RNA, 21 nt, RNAi-antisense strand
uucacaacggagauggcacuu

SEQ ID NO: 3550 - DNA, 21 bp, Homo sapiens
catctccgttgtgaagattct

SEQ ID NO: 3551 - RNA, 21 nt, RNAi-sense strand
ucuccguugugaagauucuuu

SEQ ID NO: 3552 - RNA, 21 nt, RNAi-antisense strand
agaaucuucacaacggagauu

SEQ ID NO: 3553 - DNA, 21 bp, Homo sapiens
cacgtggtccagtgcgtcttc

SEQ ID NO: 3554 - RNA, 21 nt, RNAi-sense strand
cgugguccagugcgucuucuu

SEQ ID NO: 3555 - RNA, 21 nt, RNAi-antisense strand
gaagacgcacuggaccacguu

SEQ ID NO: 3556 - DNA, 21 bp, Homo sapiens
cagtgcgtcttcgtggccatc

SEQ ID NO: 3557 - RNA, 21 nt, RNAi-sense strand
gugcgucuucguggccaucuu

SEQ ID NO: 3558 - RNA, 21 nt, RNAi-antisense strand
gauggccacgaagacgcacuu

SEQ ID NO: 3559 - DNA, 21 bp, Homo sapiens
catccggaccatcggcaacat

SEQ ID NO: 3560 - RNA, 21 nt, RNAi-sense strand
uccggaccaucggcaacauuu

SEQ ID NO: 3561 - RNA, 21 nt, RNAi-antisense strand
auguugccgaugguccggauu

SEQ ID NO: 3562 - DNA, 21 bp, Homo sapiens
catcggcaacatcatgatcgt

SEQ ID NO: 3563 - RNA, 21 nt, RNAi-sense strand
ucggcaacaucaugaucguuu

SEQ ID NO: 3564 - RNA, 21 nt, RNAi-antisense strand
acgaucaugauguugccgauu

SEQ ID NO: 3565 - DNA, 21 bp, Homo sapiens
caacatcatgatcgtcactac

SEQ ID NO: 3566 - RNA, 21 nt, RNAi-sense strand
acaucaugaucgucacuacuu

SEQ ID NO: 3567 - RNA, 21 nt, RNAi-antisense strand
guagugacgaucaugauguuu

SEQ ID NO: 3568 - DNA, 21 bp, Homo sapiens
cagttcatgtttgcctgtatc

SEQ ID NO: 3569 - RNA, 21 nt, RNAi-sense strand
guucauguuugccuguaucuu

SEQ ID NO: 3570 - RNA, 21 nt, RNAi-antisense strand
gauacaggcaaacaugaacuu

SEQ ID NO: 3571 - DNA, 21 bp, Homo sapiens
cagtcctgtggtccgtgaacg

SEQ ID NO: 3572 - RNA, 21 nt, RNAi-sense strand
guccugugguccgugaacguu

SEQ ID NO: 3573 - RNA, 21 nt, RNAi-antisense strand
cguucacggaccacaggacuu

SEQ ID NO: 3574 - DNA, 21 bp, Homo sapiens
cagtgatttcaacttcgacaa

SEQ ID NO: 3575 - RNA, 21 nt, RNAi-sense strand
gugauuucaacuucgacaauu

SEQ ID NO: 3576 - RNA, 21 nt, RNAi-antisense strand
uugucgaaguugaaaucacuu

SEQ ID NO: 3577 - DNA, 21 bp, Homo sapiens
caacttcgacaacgtcctctc

SEQ ID NO: 3578 - RNA, 21 nt, RNAi-sense strand
acuucgacaacguccucucuu

SEQ ID NO: 3579 - RNA, 21 nt, RNAi-antisense strand
gagaggacguugucgaaguuu

SEQ ID NO: 3580 - DNA, 21 bp, Homo sapiens
caacgtcctctctgctatgat

SEQ ID NO: 3581 - RNA, 21 nt, RNAi-sense strand
acguccucucugcuaugauuu

SEQ ID NO: 3582 - RNA, 21 nt, RNAi-antisense strand
aucauagcagagaggacguuu

SEQ ID NO: 3583 - DNA, 21 bp, Homo sapiens
catcgactcgaatggagagaa

SEQ ID NO: 3584 - RNA, 21 nt, RNAi-sense strand
ucgacucgaauggagagaauu

SEQ ID NO: 3585 - RNA, 21 nt, RNAi-antisense strand
uucucuccauucgagucgauu

SEQ ID NO: 3586 - DNA, 21 bp, Homo sapiens
caatctacaaccaccgcgtgg

SEQ ID NO: 3587 - RNA, 21 nt, RNAi-sense strand
aucuacaaccaccgcgugguu

SEQ ID NO: 3588 - RNA, 21 nt, RNAi-antisense strand
ccacgcggugguuguagauuu

SEQ ID NO: 3589 - DNA, 21 bp, Homo sapiens
caaccaccgcgtggagatctc

SEQ ID NO: 3590 - RNA, 21 nt, RNAi-sense strand
accaccgcguggagaucucuu

SEQ ID NO: 3591 - RNA, 21 nt, RNAi-antisense strand
gagaucuccacgcggugguuu

SEQ ID NO: 3592 - DNA, 21 bp, Homo sapiens
caccgcgtggagatctccatc

SEQ ID NO: 3593 - RNA, 21 nt, RNAi-sense strand
ccgcguggagaucuccaucuu

SEQ ID NO: 3594 - RNA, 21 nt, RNAi-antisense strand
gauggagaucuccacgcgguu

SEQ ID NO: 3595 - DNA, 21 bp, Homo sapiens
catcttcttcatcatctacat

SEQ ID NO: 3596 - RNA, 21 nt, RNAi-sense strand
ucuucuucaucaucuacauuu

SEQ ID NO: 3597 - RNA, 21 nt, RNAi-antisense strand
auguagaugaugaagaagauu

SEQ ID NO: 3598 - DNA, 21 bp, Homo sapiens
catcatctacatcatcattgt

SEQ ID NO: 3599 - RNA, 21 nt, RNAi-sense strand
ucaucuacaucaucauuguuu

SEQ ID NO: 3600 - RNA, 21 nt, RNAi-antisense strand
acaaugaugauguagaugauu

SEQ ID NO: 3601 - DNA, 21 bp, Homo sapiens
catctacatcatcattgtagc

SEQ ID NO: 3602 - RNA, 21 nt, RNAi-sense strand
ucuacaucaucauuguagcuu

SEQ ID NO: 3603 - RNA, 21 nt, RNAi-antisense strand
gcuacaaugaugauguagauu

SEQ ID NO: 3604 - DNA, 21 bp, Homo sapiens
catcatcattgtagctttctt

SEQ ID NO: 3605 - RNA, 21 nt, RNAi-sense strand
ucaucauuguagcuuucuuuu

SEQ ID NO: 3606 - RNA, 21 nt, RNAi-antisense strand
aagaaagcuacaaugaugauu

SEQ ID NO: 3607 - DNA, 21 bp, Homo sapiens
catcattgtagctttcttcat

SEQ ID NO: 3608 - RNA, 21 nt, RNAi-sense strand
ucauuguagcuuucuucauuu

SEQ ID NO: 3609 - RNA, 21 nt, RNAi-antisense strand
augaagaaagcuacaaugauu

SEQ ID NO: 3610 - DNA, 21 bp, Homo sapiens
cattgtagctttcttcatgat

SEQ ID NO: 3611 - RNA, 21 nt, RNAi-sense strand
uuguagcuuucuucaugauuu

SEQ ID NO: 3612 - RNA, 21 nt, RNAi-antisense strand
aucaugaagaaagcuacaauu

SEQ ID NO: 3613 - DNA, 21 bp, Homo sapiens
catcgttacatttcaggaaca

SEQ ID NO: 3614 - RNA, 21 nt, RNAi-sense strand
ucguuacauuucaggaacauu

SEQ ID NO: 3615 - RNA, 21 nt, RNAi-antisense strand
uguuccugaaauguaacgauu

SEQ ID NO: 3616 - DNA, 21 bp, Homo sapiens
catttcaggaacaaggagaaa

SEQ ID NO: 3617 - RNA, 21 nt, RNAi-sense strand
uuucaggaacaaggagaaauu

SEQ ID NO: 3618 - RNA, 21 nt, RNAi-antisense strand
uuucuccuuguuccugaaauu

SEQ ID NO: 3619 - DNA, 21 bp, Homo sapiens
cagcgtcagtgtgttgaatac

SEQ ID NO: 3620 - RNA, 21 nt, RNAi-sense strand
gcgucaguguguugaauacuu

SEQ ID NO: 3621 - RNA, 21 nt, RNAi-antisense strand
guauucaacacacugacgcuu

SEQ ID NO: 3622 - DNA, 21 bp, Homo sapiens
cagtgtgttgaatacgccttg

SEQ ID NO: 3623 - RNA, 21 nt, RNAi-sense strand
guguguugaauacgccuuguu

SEQ ID NO: 3624 - RNA, 21 nt, RNAi-antisense strand
caaggcguauucaacacacuu

SEQ ID NO: 3625 - DNA, 21 bp, Homo sapiens
cagtacaagttctggtacgtg

SEQ ID NO: 3626 - RNA, 21 nt, RNAi-sense strand
guacaaguucugguacguguu

SEQ ID NO: 3627 - RNA, 21 nt, RNAi-antisense strand
cacguaccagaacuuguacuu

SEQ ID NO: 3628 - DNA, 21 bp, Homo sapiens
caagttctggtacgtggtgaa

SEQ ID NO: 3629 - RNA, 21 nt, RNAi-sense strand
aguucugguacguggugaauu

SEQ ID NO: 3630 - RNA, 21 nt, RNAi-antisense strand
uucaccacguaccagaacuuu

SEQ ID NO: 3631 - DNA, 21 bp, Homo sapiens
catgatgtttgtcctcatcat

SEQ ID NO: 3632 - RNA, 21 nt, RNAi-sense strand
ugauguuuguccucaucauuu

SEQ ID NO: 3633 - RNA, 21 nt, RNAi-antisense strand
augaugaggacaaacaucauu

SEQ ID NO: 3634 - DNA, 21 bp, Homo sapiens
catcatgctcaacacactctg

SEQ ID NO: 3635 - RNA, 21 nt, RNAi-sense strand
ucaugcucaacacacucuguu

SEQ ID NO: 3636 - RNA, 21 nt, RNAi-antisense strand
cagaguguguugagcaugauu

SEQ ID NO: 3637 - DNA, 21 bp, Homo sapiens
catgctcaacacactctgctt

SEQ ID NO: 3638 - RNA, 21 nt, RNAi-sense strand
ugcucaacacacucugcuuuu

SEQ ID NO: 3639 - RNA, 21 nt, RNAi-antisense strand
aagcagaguguguugagcauu

SEQ ID NO: 3640 - DNA, 21 bp, Homo sapiens
caacacactctgcttggccat

SEQ ID NO: 3641 - RNA, 21 nt, RNAi-sense strand
acacacucugcuuggccauuu

SEQ ID NO: 3642 - RNA, 21 nt, RNAi-antisense strand
auggccaagcagaguguguuu

SEQ ID NO: 3643 - DNA, 21 bp, Homo sapiens
cacactctgcttggccatgca

SEQ ID NO: 3644 - RNA, 21 nt, RNAi-sense strand
cacucugcuuggccaugcauu

SEQ ID NO: 3645 - RNA, 21 nt, RNAi-antisense strand
ugcauggccaagcagaguguu

SEQ ID NO: 3646 - DNA, 21 bp, Homo sapiens
cactctgcttggccatgcagc

SEQ ID NO: 3647 - RNA, 21 nt, RNAi-sense strand
cucugcuuggccaugcagcuu

SEQ ID NO: 3648 - RNA, 21 nt, RNAi-antisense strand
gcugcauggccaagcagaguu

SEQ ID NO: 3649 - DNA, 21 bp, Homo sapiens
catgcagcactacgagcagtc

SEQ ID NO: 3650 - RNA, 21 nt, RNAi-sense strand
ugcagcacuacgagcagucuu

SEQ ID NO: 3651 - RNA, 21 nt, RNAi-antisense strand
gacugcucguagugcugcauu

SEQ ID NO: 3652 - DNA, 21 bp, Homo sapiens
cagcactacgagcagtccaag

SEQ ID NO: 3653 - RNA, 21 nt, RNAi-sense strand
gcacuacgagcaguccaaguu

SEQ ID NO: 3654 - RNA, 21 nt, RNAi-antisense strand
cuuggacugcucguagugcuu

SEQ ID NO: 3655 - DNA, 21 bp, Homo sapiens
cactacgagcagtccaagatg

SEQ ID NO: 3656 - RNA, 21 nt, RNAi-sense strand
cuacgagcaguccaagauguu

SEQ ID NO: 3657 - RNA, 21 nt, RNAi-antisense strand
caucuuggacugcucguaguu

SEQ ID NO: 3658 - DNA, 21 bp, Homo sapiens
cagtccaagatgttcaatgat

SEQ ID NO: 3659 - RNA, 21 nt, RNAi-sense strand
guccaagauguucaaugauuu

SEQ ID NO: 3660 - RNA, 21 nt, RNAi-antisense strand
aucauugaacaucuuggacuu

SEQ ID NO: 3661 - DNA, 21 bp, Homo sapiens
caagatgttcaatgatgccat

SEQ ID NO: 3662 - RNA, 21 nt, RNAi-sense strand
agauguucaaugaugccauuu

SEQ ID NO: 3663 - RNA, 21 nt, RNAi-antisense strand
auggcaucauugaacaucuuu

SEQ ID NO: 3664 - DNA, 21 bp, Homo sapiens
caatgatgccatggacattct

SEQ ID NO: 3665 - RNA, 21 nt, RNAi-sense strand
augaugccauggacauucuuu

SEQ ID NO: 3666 - RNA, 21 nt, RNAi-antisense strand
agaauguccauggcaucauuu

SEQ ID NO: 3667 - DNA, 21 bp, Homo sapiens
catggacattctgaacatggt

SEQ ID NO: 3668 - RNA, 21 nt, RNAi-sense strand
uggacauucugaacaugguuu

SEQ ID NO: 3669 - RNA, 21 nt, RNAi-antisense strand
accauguucagaauguccauu

SEQ ID NO: 3670 - DNA, 21 bp, Homo sapiens
cattctgaacatggtcttcac

SEQ ID NO: 3671 - RNA, 21 nt, RNAi-sense strand
uucugaacauggucuucacuu

SEQ ID NO: 3672 - RNA, 21 nt, RNAi-antisense strand
gugaagaccauguucagaauu

SEQ ID NO: 3673 - DNA, 21 bp, Homo sapiens
catcgtaatcggcagcattat

SEQ ID NO: 3674 - RNA, 21 nt, RNAi-sense strand
ucguaaucggcagcauuauuu

SEQ ID NO: 3675 - RNA, 21 nt, RNAi-antisense strand
auaaugcugccgauuacgauu

SEQ ID NO: 3676 - DNA, 21 bp, Homo sapiens
caatagaatctccatcacctt

SEQ ID NO: 3677 - RNA, 21 nt, RNAi-sense strand
auagaaucuccaucaccuuuu

SEQ ID NO: 3678 - RNA, 21 nt, RNAi-antisense strand
aaggugauggagauucuauuu

SEQ ID NO: 3679 - DNA, 21 bp, Homo sapiens
catccggacattgctgtggac

SEQ ID NO: 3680 - RNA, 21 nt, RNAi-sense strand
uccggacauugcuguggacuu

SEQ ID NO: 3681 - RNA, 21 nt, RNAi-antisense strand
guccacagcaauguccggauu

SEQ ID NO: 3682 - DNA, 21 bp, Homo sapiens
catagccatgctgttcttcat

SEQ ID NO: 3683 - RNA, 21 nt, RNAi-sense strand
uagccaugcuguucuucauuu

SEQ ID NO: 3684 - RNA, 21 nt, RNAi-antisense strand
augaagaacagcauggcuauu

SEQ ID NO: 3685 - DNA, 21 bp, Homo sapiens
catgctgttcttcatctatgc

SEQ ID NO: 3686 - RNA, 21 nt, RNAi-sense strand
ugcuguucuucaucuaugcuu

SEQ ID NO: 3687 - RNA, 21 nt, RNAi-antisense strand
gcauagaugaagaacagcauu

SEQ ID NO: 3688 - DNA, 21 bp, Homo sapiens
catctatgcggtcattggcat

SEQ ID NO: 3689 - RNA, 21 nt, RNAi-sense strand
ucuaugcggucauuggcauuu

SEQ ID NO: 3690 - RNA, 21 nt, RNAi-antisense strand
augccaaugaccgcauagauu

SEQ ID NO: 3691 - DNA, 21 bp, Homo sapiens
cattggcatgcagatgtttgg

SEQ ID NO: 3692 - RNA, 21 nt, RNAi-sense strand
uuggcaugcagauguuugguu

SEQ ID NO: 3693 - RNA, 21 nt, RNAi-antisense strand
ccaaacaucugcaugccaauu

SEQ ID NO: 3694 - DNA, 21 bp, Homo sapiens
catgagagataacaaccagat

SEQ ID NO: 3695 - RNA, 21 nt, RNAi-sense strand
ugagagauaacaaccagauuu

SEQ ID NO: 3696 - RNA, 21 nt, RNAi-antisense strand
aucugguuguuaucucucauu

SEQ ID NO: 3697 - DNA, 21 bp, Homo sapiens
caaccagatcaataggaacaa

SEQ ID NO: 3698 - RNA, 21 nt, RNAi-sense strand
accagaucaauaggaacaauu

SEQ ID NO: 3699 - RNA, 21 nt, RNAi-antisense strand
uuguuccuauugaucugguuu

SEQ ID NO: 3700 - DNA, 21 bp, Homo sapiens
cagatcaataggaacaataac

SEQ ID NO: 3701 - RNA, 21 nt, RNAi-sense strand
gaucaauaggaacaauaacuu

SEQ ID NO: 3702 - RNA, 21 nt, RNAi-antisense strand
guuauuguuccuauugaucuu

SEQ ID NO: 3703 - DNA, 21 bp, Homo sapiens
caataggaacaataacttcca

SEQ ID NO: 3704 - RNA, 21 nt, RNAi-sense strand
auaggaacaauaacuuccauu

SEQ ID NO: 3705 - RNA, 21 nt, RNAi-antisense strand
uggaaguuauuguuccuauuu

SEQ ID NO: 3706 - DNA, 21 bp, Homo sapiens
caataacttccagacgtttcc

SEQ ID NO: 3707 - RNA, 21 nt, RNAi-sense strand
auaacuuccagacguuuccuu

SEQ ID NO: 3708 - RNA, 21 nt, RNAi-antisense strand
ggaaacgucuggaaguuauuu

SEQ ID NO: 3709 - DNA, 21 bp, Homo sapiens
caggtgtgcaacaggtgaggc

SEQ ID NO: 3710 - RNA, 21 nt, RNAi-sense strand
ggugugcaacaggugaggcuu

SEQ ID NO: 3711 - RNA, 21 nt, RNAi-antisense strand
gccucaccuguugcacaccuu

SEQ ID NO: 3712 - DNA, 21 bp, Homo sapiens
caggagatcatgctggcctgt

SEQ ID NO: 3713 - RNA, 21 nt, RNAi-sense strand
ggagaucaugcuggccuguuu

SEQ ID NO: 3714 - RNA, 21 nt, RNAi-antisense strand
acaggccagcaugaucuccuu

SEQ ID NO: 3715 - DNA, 21 bp, Homo sapiens
caactttgccattgtctattt

SEQ ID NO: 3716 - RNA, 21 nt, RNAi-sense strand
acuuugccauugucuauuuuu

SEQ ID NO: 3717 - RNA, 21 nt, RNAi-antisense strand
aaauagacaauggcaaaguuu

SEQ ID NO: 3718 - DNA, 21 bp, Homo sapiens
catgctctgtgcatttctgat

SEQ ID NO: 3719 - RNA, 21 nt, RNAi-sense strand
ugcucugugcauuucugauuu

SEQ ID NO: 3720 - RNA, 21 nt, RNAi-antisense strand
aucagaaaugcacagagcauu

SEQ ID NO: 3721 - DNA, 21 bp, Homo sapiens
catttctgatcatcaatctgt

SEQ ID NO: 3722 - RNA, 21 nt, RNAi-sense strand
uuucugaucaucaaucuguuu

SEQ ID NO: 3723 - RNA, 21 nt, RNAi-antisense strand
acagauugaugaucagaaauu

SEQ ID NO: 3724 - DNA, 21 bp, Homo sapiens
catcaatctgtttgtggctgt

SEQ ID NO: 3725 - RNA, 21 nt, RNAi-sense strand
ucaaucuguuuguggcuguuu

SEQ ID NO: 3726 - RNA, 21 nt, RNAi-antisense strand
acagccacaaacagauugauu

SEQ ID NO: 3727 - DNA, 21 bp, Homo sapiens
caatctgtttgtggctgtcat

SEQ ID NO: 3728 - RNA, 21 nt, RNAi-sense strand
aucuguuuguggcugucauuu

SEQ ID NO: 3729 - RNA, 21 nt, RNAi-antisense strand
augacagccacaaacagauuu

SEQ ID NO: 3730 - DNA, 21 bp, Homo sapiens
catcatggataatttcgacta

SEQ ID NO: 3731 - RNA, 21 nt, RNAi-sense strand
ucauggauaauuucgacuauu

SEQ ID NO: 3732 - RNA, 21 nt, RNAi-antisense strand
uagucgaaauuauccaugauu

SEQ ID NO: 3733 - DNA, 21 bp, Homo sapiens
catggataatttcgactatct

SEQ ID NO: 3734 - RNA, 21 nt, RNAi-sense strand
uggauaauuucgacuaucuuu

SEQ ID NO: 3735 - RNA, 21 nt, RNAi-antisense strand
agauagucgaaauuauccauu

SEQ ID NO: 3736 - DNA, 21 bp, Homo sapiens
caccttgatgtggtcactctg

SEQ ID NO: 3737 - RNA, 21 nt, RNAi-sense strand
ccuugauguggucacucuguu

SEQ ID NO: 3738 - RNA, 21 nt, RNAi-antisense strand
cagagugaccacaucaagguu

SEQ ID NO: 3739 - DNA, 21 bp, Homo sapiens
cactctgcttcgacgcatcca

SEQ ID NO: 3740 - RNA, 21 nt, RNAi-sense strand
cucugcuucgacgcauccauu

SEQ ID NO: 3741 - RNA, 21 nt, RNAi-antisense strand
uggaugcgucgaagcagaguu

SEQ ID NO: 3742 - DNA, 21 bp, Homo sapiens
caagagattagttgccatgaa

SEQ ID NO: 3743 - RNA, 21 nt, RNAi-sense strand
agagauuaguugccaugaauu

SEQ ID NO: 3744 - RNA, 21 nt, RNAi-antisense strand
uucauggcaacuaaucucuuu

SEQ ID NO: 3745 - DNA, 21 bp, Homo sapiens
catgaacatgcctctcaacag

SEQ ID NO: 3746 - RNA, 21 nt, RNAi-sense strand
ugaacaugccucucaacaguu

SEQ ID NO: 3747 - RNA, 21 nt, RNAi-antisense strand
cuguugagaggcauguucauu

SEQ ID NO: 3748 - DNA, 21 bp, Homo sapiens
catgcctctcaacagtgacgg

SEQ ID NO: 3749 - RNA, 21 nt, RNAi-sense strand
ugccucucaacagugacgguu

SEQ ID NO: 3750 - RNA, 21 nt, RNAi-antisense strand
ccgucacuguugagaggcauu

SEQ ID NO: 3751 - DNA, 21 bp, Homo sapiens
caagctaatgaagaacttcgg

SEQ ID NO: 3752 - RNA, 21 nt, RNAi-sense strand
agcuaaugaagaacuucgguu

SEQ ID NO: 3753 - RNA, 21 nt, RNAi-antisense strand
ccgaaguucuucauuagcuuu

SEQ ID NO: 3754 - DNA, 21 bp, Homo sapiens
cagcatgaaattacttgacca

SEQ ID NO: 3755 - RNA, 21 nt, RNAi-sense strand
gcaugaaauuacuugaccauu

SEQ ID NO: 3756 - RNA, 21 nt, RNAi-antisense strand
uggucaaguaauuucaugcuu

SEQ ID NO: 3757 - DNA, 21 bp, Homo sapiens
catgaaattacttgaccaagt

SEQ ID NO: 3758 - RNA, 21 nt, RNAi-sense strand
ugaaauuacuugaccaaguuu

SEQ ID NO: 3759 - RNA, 21 nt, RNAi-antisense strand
acuuggucaaguaauuucauu

SEQ ID NO: 3760 - DNA, 21 bp, Homo sapiens
cagctggtgatgatgaggtaa

SEQ ID NO: 3761 - RNA, 21 nt, RNAi-sense strand
gcuggugaugaugagguaauu

SEQ ID NO: 3762 - RNA, 21 nt, RNAi-antisense strand
uuaccucaucaucaccagcuu

SEQ ID NO: 3763 - DNA, 21 bp, Homo sapiens
cactttcctgatacaggacta

SEQ ID NO: 3764 - RNA, 21 nt, RNAi-sense strand
cuuuccugauacaggacuauu

SEQ ID NO: 3765 - RNA, 21 nt, RNAi-antisense strand
uaguccuguaucaggaaaguu

SEQ ID NO: 3766 - DNA, 21 bp, Homo sapiens
caggactactttaggaaattc

SEQ ID NO: 3767 - RNA, 21 nt, RNAi-sense strand
ggacuacuuuaggaaauucuu

SEQ ID NO: 3768 - RNA, 21 nt, RNAi-antisense strand
gaauuuccuaaaguaguccuu

SEQ ID NO: 3769 - DNA, 21 bp, Homo sapiens
caagaaacggaaagaacaagg

SEQ ID NO: 3770 - RNA, 21 nt, RNAi-sense strand
agaaacggaaagaacaagguu

SEQ ID NO: 3771 - RNA, 21 nt, RNAi-antisense strand
ccuuguucuuuccguuucuuu

SEQ ID NO: 3772 - DNA, 21 bp, Homo sapiens
cagaaatccggcgtgctatat

SEQ ID NO: 3773 - RNA, 21 nt, RNAi-sense strand
gaaauccggcgugcuauauuu

SEQ ID NO: 3774 - RNA, 21 nt, RNAi-antisense strand
auauagcacgccggauuucuu

SEQ ID NO: 3775 - DNA, 21 bp, Homo sapiens
caagatgacgagcctgaggaa

SEQ ID NO: 3776 - RNA, 21 nt, RNAi-sense strand
agaugacgagccugaggaauu

SEQ ID NO: 3777 - RNA, 21 nt, RNAi-antisense strand
uuccucaggcucgucaucuuu

SEQ ID NO: 3778 - DNA, 21 bp, Homo sapiens
catgttaatagtgataggaga

SEQ ID NO: 3779 - RNA, 21 nt, RNAi-sense strand
uguuaauagugauaggagauu

SEQ ID NO: 3780 - RNA, 21 nt, RNAi-antisense strand
ucuccuaucacuauuaacauu

SEQ ID NO: 3781 - DNA, 21 bp, Homo sapiens
catgtccaaaggccttcaatt

SEQ ID NO: 3782 - RNA, 21 nt, RNAi-sense strand
uguccaaaggccuucaauuuu

SEQ ID NO: 3783 - RNA, 21 nt, RNAi-antisense strand
aauugaaggccuuuggacauu

SEQ ID NO: 3784 - DNA, 21 bp, Homo sapiens
caaaggccttcaattccacct

SEQ ID NO: 3785 - RNA, 21 nt, RNAi-sense strand
aaggccuucaauuccaccuuu

SEQ ID NO: 3786 - RNA, 21 nt, RNAi-antisense strand
agguggaauugaaggccuuuu

SEQ ID NO: 3787 - DNA, 21 bp, Homo sapiens
caattccacctgcaagtgata

SEQ ID NO: 3788 - RNA, 21 nt, RNAi-sense strand
auuccaccugcaagugauauu

SEQ ID NO: 3789 - RNA, 21 nt, RNAi-antisense strand
uaucacuugcagguggaauuu

SEQ ID NO: 3790 - DNA, 21 bp, Homo sapiens
cacctgcaagtgatactgaga

SEQ ID NO: 3791 - RNA, 21 nt, RNAi-sense strand
ccugcaagugauacugagauu

SEQ ID NO: 3792 - RNA, 21 nt, RNAi-antisense strand
ucucaguaucacuugcagguu

SEQ ID NO: 3793 - DNA, 21 bp, Homo sapiens
caagtgatactgagaaaccgc

SEQ ID NO: 3794 - RNA, 21 nt, RNAi-sense strand
agugauacugagaaaccgcuu

SEQ ID NO: 3795 - RNA, 21 nt, RNAi-antisense strand
gcgguuucucaguaucacuuu

SEQ ID NO: 3796 - DNA, 21 bp, Homo sapiens
cagcaggaaattcggtgtgtc

SEQ ID NO: 3797 - RNA, 21 nt, RNAi-sense strand
gcaggaaauucggugugucuu

SEQ ID NO: 3798 - RNA, 21 nt, RNAi-antisense strand
gacacaccgaauuuccugcuu

SEQ ID NO: 3799 - DNA, 21 bp, Homo sapiens
caggaaattcggtgtgtcata

SEQ ID NO: 3800 - RNA, 21 nt, RNAi-sense strand
ggaaauucggugugucauauu

SEQ ID NO: 3801 - RNA, 21 nt, RNAi-antisense strand
uaugacacaccgaauuuccuu

SEQ ID NO: 3802 - DNA, 21 bp, Homo sapiens
cataaccataattccatagga

SEQ ID NO: 3803 - RNA, 21 nt, RNAi-sense strand
uaaccauaauuccauaggauu

SEQ ID NO: 3804 - RNA, 21 nt, RNAi-antisense strand
uccuauggaauuaugguuauu

SEQ ID NO: 3805 - DNA, 21 bp, Homo sapiens
cataattccataggaaagcaa

SEQ ID NO: 3806 - RNA, 21 nt, RNAi-sense strand
uaauuccauaggaaagcaauu

SEQ ID NO: 3807 - RNA, 21 nt, RNAi-antisense strand
uugcuuuccuauggaauuauu

SEQ ID NO: 3808 - DNA, 21 bp, Homo sapiens
cacctcaacaaatgccaatct

SEQ ID NO: 3809 - RNA, 21 nt, RNAi-sense strand
ccucaacaaaugccaaucuuu

SEQ ID NO: 3810 - RNA, 21 nt, RNAi-antisense strand
agauuggcauuuguugagguu

SEQ ID NO: 3811 - DNA, 21 bp, Homo sapiens
caacaaatgccaatctcaata

SEQ ID NO: 3812 - RNA, 21 nt, RNAi-sense strand
acaaaugccaaucucaauauu

SEQ ID NO: 3813 - RNA, 21 nt, RNAi-antisense strand
uauugagauuggcauuuguuu

SEQ ID NO: 3814 - DNA, 21 bp, Homo sapiens
caaatgccaatctcaataatg

SEQ ID NO: 3815 - RNA, 21 nt, RNAi-sense strand
aaugccaaucucaauaauguu

SEQ ID NO: 3816 - RNA, 21 nt, RNAi-antisense strand
cauuauugagauuggcauuuu

SEQ ID NO: 3817 - DNA, 21 bp, Homo sapiens
caataatgccaatatgtccaa

SEQ ID NO: 3818 - RNA, 21 nt, RNAi-sense strand
auaaugccaauauguccaauu

SEQ ID NO: 3819 - RNA, 21 nt, RNAi-antisense strand
uuggacauauuggcauuauuu

SEQ ID NO: 3820 - DNA, 21 bp, Homo sapiens
cagagaaggtccagtgtgaaa

SEQ ID NO: 3821 - RNA, 21 nt, RNAi-sense strand
gagaagguccagugugaaauu

SEQ ID NO: 3822 - RNA, 21 nt, RNAi-antisense strand
uuucacacuggaccuucucuu

SEQ ID NO: 3823 - DNA, 21 bp, Homo sapiens
cattaggtccgactcaggaga

SEQ ID NO: 3824 - RNA, 21 nt, RNAi-sense strand
uuagguccgacucaggagauu

SEQ ID NO: 3825 - RNA, 21 nt, RNAi-antisense strand
ucuccugagucggaccuaauu

SEQ ID NO: 3826 - DNA, 21 bp, Homo sapiens
cagagatacatggctatttca

SEQ ID NO: 3827 - RNA, 21 nt, RNAi-sense strand
gagauacauggcuauuucauu

SEQ ID NO: 3828 - RNA, 21 nt, RNAi-antisense strand
ugaaauagccauguaucucuu

SEQ ID NO: 3829 - DNA, 21 bp, Homo sapiens
caggagtatttcagtagtgag

SEQ ID NO: 3830 - RNA, 21 nt, RNAi-sense strand
ggaguauuucaguagugaguu

SEQ ID NO: 3831 - RNA, 21 nt, RNAi-antisense strand
cucacuacugaaauacuccuu

SEQ ID NO: 3832 - DNA, 21 bp, Homo sapiens
cagtagtgaggaatgctacga

SEQ ID NO: 3833 - RNA, 21 nt, RNAi-sense strand
guagugaggaaugcuacgauu

SEQ ID NO: 3834 - RNA, 21 nt, RNAi-antisense strand
ucguagcauuccucacuacuu

SEQ ID NO: 3835 - DNA, 21 bp, Homo sapiens
caggcagaaacatcgactctg

SEQ ID NO: 3836 - RNA, 21 nt, RNAi-sense strand
ggcagaaacaucgacucuguu

SEQ ID NO: 3837 - RNA, 21 nt, RNAi-antisense strand
cagagucgauguuucugccuu

SEQ ID NO: 3838 - DNA, 21 bp, Homo sapiens
cagaaacatcgactctgagag

SEQ ID NO: 3839 - RNA, 21 nt, RNAi-sense strand
gaaacaucgacucugagaguu

SEQ ID NO: 3840 - RNA, 21 nt, RNAi-antisense strand
cucucagagucgauguuucuu

SEQ ID NO: 3841 - DNA, 21 bp, Homo sapiens
caaggattcttggaggacgat

SEQ ID NO: 3842 - RNA, 21 nt, RNAi-sense strand
aggauucuuggaggacgauuu

SEQ ID NO: 3843 - RNA, 21 nt, RNAi-antisense strand
aucguccuccaagaauccuuu

SEQ ID NO: 3844 - DNA, 21 bp, Homo sapiens
cacggagatctccaaggagac

SEQ ID NO: 3845 - RNA, 21 nt, RNAi-sense strand
cggagaucuccaaggagacuu

SEQ ID NO: 3846 - RNA, 21 nt, RNAi-antisense strand
gucuccuuggagaucuccguu

SEQ ID NO: 3847 - DNA, 21 bp, Homo sapiens
caaggagacgcctactacctc

SEQ ID NO: 3848 - RNA, 21 nt, RNAi-sense strand
aggagacgccuacuaccucuu

SEQ ID NO: 3849 - RNA, 21 nt, RNAi-antisense strand
gagguaguaggcgucuccuuu

SEQ ID NO: 3850 - DNA, 21 bp, Homo sapiens
caccggagatcctccttcaac

SEQ ID NO: 3851 - RNA, 21 nt, RNAi-sense strand
ccggagauccuccuucaacuu

SEQ ID NO: 3852 - RNA, 21 nt, RNAi-antisense strand
guugaaggaggaucuccgguu

SEQ ID NO: 3853 - DNA, 21 bp, Homo sapiens
caactttgagtgcctgcgccg

SEQ ID NO: 3854 - RNA, 21 nt, RNAi-sense strand
acuuugagugccugcgccguu

SEQ ID NO: 3855 - RNA, 21 nt, RNAi-antisense strand
cggcgcaggcacucaaaguuu

SEQ ID NO: 3856 - DNA, 21 bp, Homo sapiens
cagagcagccaggaagaggtc

SEQ ID NO: 3857 - RNA, 21 nt, RNAi-sense strand
gagcagccaggaagaggucuu

SEQ ID NO: 3858 - RNA, 21 nt, RNAi-antisense strand
gaccucuuccuggcugcucuu

SEQ ID NO: 3859 - DNA, 21 bp, Homo sapiens
catctaatgcagcaacagatc

SEQ ID NO: 3860 - RNA, 21 nt, RNAi-sense strand
ucuaaugcagcaacagaucuu

SEQ ID NO: 3861 - RNA, 21 nt, RNAi-antisense strand
gaucuguugcugcauuagauu

SEQ ID NO: 3862 - DNA, 21 bp, Homo sapiens
cagcaacagatcatggcagtt

SEQ ID NO: 3863 - RNA, 21 nt, RNAi-sense strand
gcaacagaucauggcaguuuu

SEQ ID NO: 3864 - RNA, 21 nt, RNAi-antisense strand
aacugccaugaucuguugcuu

SEQ ID NO: 3865 - DNA, 21 bp, Homo sapiens
caacagatcatggcagttgcc

SEQ ID NO: 3866 - RNA, 21 nt, RNAi-sense strand
acagaucauggcaguugccuu

SEQ ID NO: 3867 - RNA, 21 nt, RNAi-antisense strand
ggcaacugccaugaucuguuu

SEQ ID NO: 3868 - DNA, 21 bp, Homo sapiens
cagatcatggcagttgccggc

SEQ ID NO: 3869 - RNA, 21 nt, RNAi-sense strand
gaucauggcaguugccggcuu

SEQ ID NO: 3870 - RNA, 21 nt, RNAi-antisense strand
gccggcaacugccaugaucuu

SEQ ID NO: 3871 - DNA, 21 bp, Homo sapiens
cagaagtactcaccgagtcac

SEQ ID NO: 3872 - RNA, 21 nt, RNAi-sense strand
gaaguacucaccgagucacuu

SEQ ID NO: 3873 - RNA, 21 nt, RNAi-antisense strand
gugacucggugaguacuucuu

SEQ ID NO: 3874 - DNA, 21 bp, Homo sapiens
caagtggagcagtcagaggcc

SEQ ID NO: 3875 - RNA, 21 nt, RNAi-sense strand
aguggagcagucagaggccuu

SEQ ID NO: 3876 - RNA, 21 nt, RNAi-antisense strand
ggccucugacugcuccacuuu

SEQ ID NO: 3877 - DNA, 21 bp, Homo sapiens
caccgcagctcctggtacaca

SEQ ID NO: 3878 - RNA, 21 nt, RNAi-sense strand
ccgcagcuccugguacacauu

SEQ ID NO: 3879 - RNA, 21 nt, RNAi-antisense strand
uguguaccaggagcugcgguu

SEQ ID NO: 3880 - DNA, 21 bp, Homo sapiens
cagctcctggtacacagacga

SEQ ID NO: 3881 - RNA, 21 nt, RNAi-sense strand
gcuccugguacacagacgauu

SEQ ID NO: 3882 - RNA, 21 nt, RNAi-antisense strand
ucgucuguguaccaggagcuu

SEQ ID NO: 3883 - DNA, 21 bp, Homo sapiens
catctcctaccggactttcac

SEQ ID NO: 3884 - RNA, 21 nt, RNAi-sense strand
ucuccuaccggacuuucacuu

SEQ ID NO: 3885 - RNA, 21 nt, RNAi-antisense strand
gugaaaguccgguaggagauu

SEQ ID NO: 3886 - DNA, 21 bp, Homo sapiens
cacaccagccagcctgactgt

SEQ ID NO: 3887 - RNA, 21 nt, RNAi-sense strand
caccagccagccugacuguuu

SEQ ID NO: 3888 - RNA, 21 nt, RNAi-antisense strand
acagucaggcuggcugguguu

SEQ ID NO: 3889 - DNA, 21 bp, Homo sapiens
cagcgacaagcagaggagtgc

SEQ ID NO: 3890 - RNA, 21 nt, RNAi-sense strand
gcgacaagcagaggagugcuu

SEQ ID NO: 3891 - RNA, 21 nt, RNAi-antisense strand
gcacuccucugcuugucgcuu

SEQ ID NO: 3892 - DNA, 21 bp, Homo sapiens
caagcagaggagtgcggacag

SEQ ID NO: 3893 - RNA, 21 nt, RNAi-sense strand
agcagaggagugcggacaguu

SEQ ID NO: 3894 - RNA, 21 nt, RNAi-antisense strand
cuguccgcacuccucugcuuu

SEQ ID NO: 3895 - DNA, 21 bp, Homo sapiens
cagaggagtgcggacagcttg

SEQ ID NO: 3896 - RNA, 21 nt, RNAi-sense strand
gaggagugcggacagcuuguu

SEQ ID NO: 3897 - RNA, 21 nt, RNAi-antisense strand
caagcuguccgcacuccucuu

SEQ ID NO: 3898 - DNA, 21 bp, Homo sapiens
cagcttggtggaggcagtcct

SEQ ID NO: 3899 - RNA, 21 nt, RNAi-sense strand
gcuugguggaggcaguccuuu

SEQ ID NO: 3900 - RNA, 21 nt, RNAi-antisense strand
aggacugccuccaccaagcuu

SEQ ID NO: 3901 - DNA, 21 bp, Homo sapiens
cagtcctgatatccgaaggct

SEQ ID NO: 3902 - RNA, 21 nt, RNAi-sense strand
guccugauauccgaaggcuuu

SEQ ID NO: 3903 - RNA, 21 nt, RNAi-antisense strand
agccuucggauaucaggacuu

SEQ ID NO: 3904 - DNA, 21 bp, Homo sapiens
cacgaaatcgctgatgcctgt

SEQ ID NO: 3905 - RNA, 21 nt, RNAi-sense strand
cgaaaucgcugaugccuguuu

SEQ ID NO: 3906 - RNA, 21 nt, RNAi-antisense strand
acaggcaucagcgauuucguu

SEQ ID NO: 3907 - DNA, 21 bp, Homo sapiens
caccatcgacgagatggagag

SEQ ID NO: 3908 - RNA, 21 nt, RNAi-sense strand
ccaucgacgagauggagaguu

SEQ ID NO: 3909 - RNA, 21 nt, RNAi-antisense strand
cucuccaucucgucgaugguu

SEQ ID NO: 3910 - DNA, 21 bp, Homo sapiens
catcgacgagatggagagtgc

SEQ ID NO: 3911 - RNA, 21 nt, RNAi-sense strand
ucgacgagauggagagugcuu

SEQ ID NO: 3912 - RNA, 21 nt, RNAi-antisense strand
gcacucuccaucucgucgauu

SEQ ID NO: 3913 - DNA, 21 bp, Homo sapiens
cacaccggcaggactatgagc

SEQ ID NO: 3914 - RNA, 21 nt, RNAi-sense strand
caccggcaggacuaugagcuu

SEQ ID NO: 3915 - RNA, 21 nt, RNAi-antisense strand
gcucauaguccugccgguguu

SEQ ID NO: 3916 - DNA, 21 bp, Homo sapiens
caccggcaggactatgagcta

SEQ ID NO: 3917 - RNA, 21 nt, RNAi-sense strand
ccggcaggacuaugagcuauu

SEQ ID NO: 3918 - RNA, 21 nt, RNAi-antisense strand
uagcucauaguccugccgguu

SEQ ID NO: 3919 - DNA, 21 bp, Homo sapiens
caggactatgagctacaggac

SEQ ID NO: 3920 - RNA, 21 nt, RNAi-sense strand
ggacuaugagcuacaggacuu

SEQ ID NO: 3921 - RNA, 21 nt, RNAi-antisense strand
guccuguagcucauaguccuu

SEQ ID NO: 3922 - DNA, 21 bp, Homo sapiens
caggactttggtcctggctac

SEQ ID NO: 3923 - RNA, 21 nt, RNAi-sense strand
ggacuuugguccuggcuacuu

SEQ ID NO: 3924 - RNA, 21 nt, RNAi-antisense strand
guagccaggaccaaaguccuu

SEQ ID NO: 3925 - DNA, 21 bp, Homo sapiens
catagttaggaaagtttaggc

SEQ ID NO: 3926 - RNA, 21 nt, RNAi-sense strand
uaguuaggaaaguuuaggcuu

SEQ ID NO: 3927 - RNA, 21 nt, RNAi-antisense strand
gccuaaacuuuccuaacuauu

SEQ ID NO: 3928 - DNA, 21 bp, Homo sapiens
catgcctcaagaaagccataa

SEQ ID NO: 3929 - RNA, 21 nt, RNAi-sense strand
ugccucaagaaagccauaauu

SEQ ID NO: 3930 - RNA, 21 nt, RNAi-antisense strand
uuauggcuuucuugaggcauu

SEQ ID NO: 3931 - DNA, 21 bp, Homo sapiens
caagaaagccataaacctggt

SEQ ID NO: 3932 - RNA, 21 nt, RNAi-sense strand
agaaagccauaaaccugguuu

SEQ ID NO: 3933 - RNA, 21 nt, RNAi-antisense strand
accagguuuauggcuuucuuu

SEQ ID NO: 3934 - DNA, 21 bp, Homo sapiens
cataaacctggtaggaacagg

SEQ ID NO: 3935 - RNA, 21 nt, RNAi-sense strand
uaaaccugguaggaacagguu

SEQ ID NO: 3936 - RNA, 21 nt, RNAi-antisense strand
ccuguuccuaccagguuuauu

SEQ ID NO: 3937 - DNA, 21 bp, Homo sapiens
caagcggttgagcctggcaga

SEQ ID NO: 3938 - RNA, 21 nt, RNAi-sense strand
agcgguugagccuggcagauu

SEQ ID NO: 3939 - RNA, 21 nt, RNAi-antisense strand
ucugccaggcucaaccgcuuu

SEQ ID NO: 3940 - DNA, 21 bp, Homo sapiens
cagctgcaggaaacagcaggc

SEQ ID NO: 3941 - RNA, 21 nt, RNAi-sense strand
gcugcaggaaacagcaggcuu

SEQ ID NO: 3942 - RNA, 21 nt, RNAi-antisense strand
gccugcuguuuccugcagcuu

SEQ ID NO: 3943 - DNA, 21 bp, Homo sapiens
cactgctgtggagtctgcttc

SEQ ID NO: 3944 - RNA, 21 nt, RNAi-sense strand
cugcuguggagucugcuucuu

SEQ ID NO: 3945 - RNA, 21 nt, RNAi-antisense strand
gaagcagacuccacagcaguu

SEQ ID NO: 3946 - DNA, 21 bp, Homo sapiens
catcacacctcgtgtcgttac

SEQ ID NO: 3947 - RNA, 21 nt, RNAi-sense strand
ucacaccucgugucguuacuu

SEQ ID NO: 3948 - RNA, 21 nt, RNAi-antisense strand
guaacgacacgaggugugauu

SEQ ID NO: 3949 - DNA, 21 bp, Homo sapiens
cacacctcgtgtcgttacctc

SEQ ID NO: 3950 - RNA, 21 nt, RNAi-sense strand
caccucgugucguuaccucuu

SEQ ID NO: 3951 - RNA, 21 nt, RNAi-antisense strand
gagguaacgacacgagguguu

SEQ ID NO: 3952 - DNA, 21 bp, Homo sapiens
cacctcgtgtcgttacctcag

SEQ ID NO: 3953 - RNA, 21 nt, RNAi-sense strand
ccucgugucguuaccucaguu

SEQ ID NO: 3954 - RNA, 21 nt, RNAi-antisense strand
cugagguaacgacacgagguu

SEQ ID NO: 3955 - DNA, 21 bp, Homo sapiens
cagccatcggtctagcatatc

SEQ ID NO: 3956 - RNA, 21 nt, RNAi-sense strand
gccaucggucuagcauaucuu

SEQ ID NO: 3957 - RNA, 21 nt, RNAi-antisense strand
gauaugcuagaccgauggcuu

SEQ ID NO: 3958 - DNA, 21 bp, Homo sapiens
catcggtctagcatatcagtc

SEQ ID NO: 3959 - RNA, 21 nt, RNAi-sense strand
ucggucuagcauaucagucuu

SEQ ID NO: 3960 - RNA, 21 nt, RNAi-antisense strand
gacugauaugcuagaccgauu

SEQ ID NO: 3961 - DNA, 21 bp, Homo sapiens
caaatacactgcgtcctggtt

SEQ ID NO: 3962 - RNA, 21 nt, RNAi-sense strand
aauacacugcguccugguuuu

SEQ ID NO: 3963 - RNA, 21 nt, RNAi-antisense strand
aaccaggacgcaguguauuuu

SEQ ID NO: 3964 - DNA, 21 bp, Homo sapiens
cactgcgtcctggttcctgtt

SEQ ID NO: 3965 - RNA, 21 nt, RNAi-sense strand
cugcguccugguuccuguuuu

SEQ ID NO: 3966 - RNA, 21 nt, RNAi-antisense strand
aacaggaaccaggacgcaguu

SEQ ID NO: 3967 - DNA, 21 bp, Homo sapiens
gatgatgatgatgatgatgat

SEQ ID NO: 3968 - RNA, 21 nt, RNAi-sense strand
ugaugaugaugaugaugauuu

SEQ ID NO: 3969 - RNA, 21 nt, RNAi-antisense strand
aucaucaucaucaucaucauu

SEQ ID NO: 3970 - DNA, 21 bp, Homo sapiens
gatgatgatgatgatgatgaa

SEQ ID NO: 3971 - RNA, 21 nt, RNAi-sense strand
ugaugaugaugaugaugaauu

SEQ ID NO: 3972 - RNA, 21 nt, RNAi-antisense strand
uucaucaucaucaucaucauu

SEQ ID NO: 3973 - DNA, 21 bp, Homo sapiens
gaccacgcgaacgaggcaaac

SEQ ID NO: 3974 - RNA, 21 nt, RNAi-sense strand
ccacgcgaacgaggcaaacuu

SEQ ID NO: 3975 - RNA, 21 nt, RNAi-antisense strand
guuugccucguucgcgugguu

SEQ ID NO: 3976 - DNA, 21 bp, Homo sapiens
gaacgaggcaaactatgcaag

SEQ ID NO: 3977 - RNA, 21 nt, RNAi-sense strand
acgaggcaaacuaugcaaguu

SEQ ID NO: 3978 - RNA, 21 nt, RNAi-antisense strand
cuugcauaguuugccucguuu

SEQ ID NO: 3979 - DNA, 21 bp, Homo sapiens
gaggcaaactatgcaagaggc

SEQ ID NO: 3980 - RNA, 21 nt, RNAi-sense strand
ggcaaacuaugcaagaggcuu

SEQ ID NO: 3981 - RNA, 21 nt, RNAi-antisense strand
gccucuugcauaguuugccuu

SEQ ID NO: 3982 - DNA, 21 bp, Homo sapiens
gaggcaccagacttcctcttt

SEQ ID NO: 3983 - RNA, 21 nt, RNAi-sense strand
ggcaccagacuuccucuuuuu

SEQ ID NO: 3984 - RNA, 21 nt, RNAi-antisense strand
aaagaggaagucuggugccuu

SEQ ID NO: 3985 - DNA, 21 bp, Homo sapiens
gacttcctctttctggtgaag

SEQ ID NO: 3986 - RNA, 21 nt, RNAi-sense strand
cuuccucuuucuggugaaguu

SEQ ID NO: 3987 - RNA, 21 nt, RNAi-antisense strand
cuucaccagaaagaggaaguu

SEQ ID NO: 3988 - DNA, 21 bp, Homo sapiens
gaaggaccaacttctcagccg

SEQ ID NO: 3989 - RNA, 21 nt, RNAi-sense strand
aggaccaacuucucagccguu

SEQ ID NO: 3990 - RNA, 21 nt, RNAi-antisense strand
cggcugagaaguugguccuuu

SEQ ID NO: 3991 - DNA, 21 bp, Homo sapiens
gaccaacttctcagccgaata

SEQ ID NO: 3992 - RNA, 21 nt, RNAi-sense strand
ccaacuucucagccgaauauu

SEQ ID NO: 3993 - RNA, 21 nt, RNAi-antisense strand
uauucggcugagaaguugguu

SEQ ID NO: 3994 - DNA, 21 bp, Homo sapiens
gaatagctccaagcaaactgt

SEQ ID NO: 3995 - RNA, 21 nt, RNAi-sense strand
auagcuccaagcaaacuguuu

SEQ ID NO: 3996 - RNA, 21 nt, RNAi-antisense strand
acaguuugcuuggagcuauuu

SEQ ID NO: 3997 - DNA, 21 bp, Homo sapiens
gatgctgctagacaggccaag

SEQ ID NO: 3998 - RNA, 21 nt, RNAi-sense strand
ugcugcuagacaggccaaguu

SEQ ID NO: 3999 - RNA, 21 nt, RNAi-antisense strand
cuuggccugucuagcagcauu

SEQ ID NO: 4000 - DNA, 21 bp, Homo sapiens
gaagagcctgcattagtatag

SEQ ID NO: 4001 - RNA, 21 nt, RNAi-sense strand
agagccugcauuaguauaguu

SEQ ID NO: 4002 - RNA, 21 nt, RNAi-antisense strand
cuauacuaaugcaggcucuuu

SEQ ID NO: 4003 - DNA, 21 bp, Homo sapiens
gagcctgcattagtatagtgg

SEQ ID NO: 4004 - RNA, 21 nt, RNAi-sense strand
gccugcauuaguauagugguu

SEQ ID NO: 4005 - RNA, 21 nt, RNAi-antisense strand
ccacuauacuaaugcaggcuu

SEQ ID NO: 4006 - DNA, 21 bp, Homo sapiens
gaatggaaaccatttgacata

SEQ ID NO: 4007 - RNA, 21 nt, RNAi-sense strand
auggaaaccauuugacauauu

SEQ ID NO: 4008 - RNA, 21 nt, RNAi-antisense strand
uaugucaaaugguuuccauuu

SEQ ID NO: 4009 - DNA, 21 bp, Homo sapiens
gaatatgccttcctgattatt

SEQ ID NO: 4010 - RNA, 21 nt, RNAi-sense strand
auaugccuuccugauuauuuu

SEQ ID NO: 4011 - RNA, 21 nt, RNAi-antisense strand
aauaaucaggaaggcauauuu

SEQ ID NO: 4012 - DNA, 21 bp, Homo sapiens
gaagattatagcgtatggatt

SEQ ID NO: 4013 - RNA, 21 nt, RNAi-sense strand
agauuauagcguauggauuuu

SEQ ID NO: 4014 - RNA, 21 nt, RNAi-antisense strand
aauccauacgcuauaaucuuu

SEQ ID NO: 4015 - DNA, 21 bp, Homo sapiens
gattattgctacatcctaatg

SEQ ID NO: 4016 - RNA, 21 nt, RNAi-sense strand
uuauugcuacauccuaauguu

SEQ ID NO: 4017 - RNA, 21 nt, RNAi-antisense strand
cauuaggauguagcaauaauu

SEQ ID NO: 4018 - DNA, 21 bp, Homo sapiens
gaatggatggaatttactgga

SEQ ID NO: 4019 - RNA, 21 nt, RNAi-sense strand
auggauggaauuuacuggauu

SEQ ID NO: 4020 - RNA, 21 nt, RNAi-antisense strand
uccaguaaauuccauccauuu

SEQ ID NO: 4021 - DNA, 21 bp, Homo sapiens
gaaccactcaagcggcaaatc

SEQ ID NO: 4022 - RNA, 21 nt, RNAi-sense strand
accacucaagcggcaaaucuu

SEQ ID NO: 4023 - RNA, 21 nt, RNAi-antisense strand
gauuugccgcuugagugguuu

SEQ ID NO: 4024 - DNA, 21 bp, Homo sapiens
gagtgttgcgaccacttcgac

SEQ ID NO: 4025 - RNA, 21 nt, RNAi-sense strand
guguugcgaccacuucgacuu

SEQ ID NO: 4026 - RNA, 21 nt, RNAi-antisense strand
gucgaaguggucgcaacacuu

SEQ ID NO: 4027 - DNA, 21 bp, Homo sapiens
gaccacttcgactagtgtcag

SEQ ID NO: 4028 - RNA, 21 nt, RNAi-sense strand
ccacuucgacuagugucaguu

SEQ ID NO: 4029 - RNA, 21 nt, RNAi-antisense strand
cugacacuagucgaagugguu

SEQ ID NO: 4030 - DNA, 21 bp, Homo sapiens
gactcagatatcgtagctgaa

SEQ ID NO: 4031 - RNA, 21 nt, RNAi-sense strand
cucagauaucguagcugaauu

SEQ ID NO: 4032 - RNA, 21 nt, RNAi-antisense strand
uucagcuacgauaucugaguu

SEQ ID NO: 4033 - DNA, 21 bp, Homo sapiens
gatatcgtagctgaagaggac

SEQ ID NO: 4034 - RNA, 21 nt, RNAi-sense strand
uaucguagcugaagaggacuu

SEQ ID NO: 4035 - RNA, 21 nt, RNAi-antisense strand
guccucuucagcuacgauauu

SEQ ID NO: 4036 - DNA, 21 bp, Homo sapiens
gaatggacgccagtgtactgc

SEQ ID NO: 4037 - RNA, 21 nt, RNAi-sense strand
auggacgccaguguacugcuu

SEQ ID NO: 4038 - RNA, 21 nt, RNAi-antisense strand
gcaguacacuggcguccauuu

SEQ ID NO: 4039 - DNA, 21 bp, Homo sapiens
gacgccagtgtactgccaatg

SEQ ID NO: 4040 - RNA, 21 nt, RNAi-sense strand
cgccaguguacugccaauguu

SEQ ID NO: 4041 - RNA, 21 nt, RNAi-antisense strand
cauuggcaguacacuggcguu

SEQ ID NO: 4042 - DNA, 21 bp, Homo sapiens
gaacggaggcatcaccaactt

SEQ ID NO: 4043 - RNA, 21 nt, RNAi-sense strand
acggaggcaucaccaacuuuu

SEQ ID NO: 4044 - RNA, 21 nt, RNAi-antisense strand
aaguuggugaugccuccguuu

SEQ ID NO: 4045 - DNA, 21 bp, Homo sapiens
gaggcatcaccaactttgata

SEQ ID NO: 4046 - RNA, 21 nt, RNAi-sense strand
ggcaucaccaacuuugauauu

SEQ ID NO: 4047 - RNA, 21 nt, RNAi-antisense strand
uaucaaaguuggugaugccuu

SEQ ID NO: 4048 - DNA, 21 bp, Homo sapiens
gataactttgcctttgccatg

SEQ ID NO: 4049 - RNA, 21 nt, RNAi-sense strand
uaacuuugccuuugccauguu

SEQ ID NO: 4050 - RNA, 21 nt, RNAi-antisense strand
cauggcaaaggcaaaguuauu

SEQ ID NO: 4051 - DNA, 21 bp, Homo sapiens
gagaattctcaaaggaaagag

SEQ ID NO: 4052 - RNA, 21 nt, RNAi-sense strand
gaauucucaaaggaaagaguu

SEQ ID NO: 4053 - RNA, 21 nt, RNAi-antisense strand
cucuuuccuuugagaauucuu

SEQ ID NO: 4054 - DNA, 21 bp, Homo sapiens
gaattctcaaaggaaagagag

SEQ ID NO: 4055 - RNA, 21 nt, RNAi-sense strand
auucucaaaggaaagagaguu

SEQ ID NO: 4056 - RNA, 21 nt, RNAi-antisense strand
cucucuuuccuuugagaauuu

SEQ ID NO: 4057 - DNA, 21 bp, Homo sapiens
gagaagcagcagctggaggag

SEQ ID NO: 4058 - RNA, 21 nt, RNAi-sense strand
gaagcagcagcuggaggaguu

SEQ ID NO: 4059 - RNA, 21 nt, RNAi-antisense strand
cuccuccagcugcugcuucuu

SEQ ID NO: 4060 - DNA, 21 bp, Homo sapiens
gaagcagcagctggaggagga

SEQ ID NO: 4061 - RNA, 21 nt, RNAi-sense strand
agcagcagcuggaggaggauu

SEQ ID NO: 4062 - RNA, 21 nt, RNAi-antisense strand
uccuccuccagcugcugcuuu

SEQ ID NO: 4063 - DNA, 21 bp, Homo sapiens
gaggacatcgatccggagaat

SEQ ID NO: 4064 - RNA, 21 nt, RNAi-sense strand
ggacaucgauccggagaauuu

SEQ ID NO: 4065 - RNA, 21 nt, RNAi-antisense strand
auucuccggaucgauguccuu

SEQ ID NO: 4066 - DNA, 21 bp, Homo sapiens
gacatcgatccggagaatgag

SEQ ID NO: 4067 - RNA, 21 nt, RNAi-sense strand
caucgauccggagaaugaguu

SEQ ID NO: 4068 - RNA, 21 nt, RNAi-antisense strand
cucauucuccggaucgauguu

SEQ ID NO: 4069 - DNA, 21 bp, Homo sapiens
gatccggagaatgaggaagaa

SEQ ID NO: 4070 - RNA, 21 nt, RNAi-sense strand
uccggagaaugaggaagaauu

SEQ ID NO: 4071 - RNA, 21 nt, RNAi-antisense strand
uucuuccucauucuccggauu

SEQ ID NO: 4072 - DNA, 21 bp, Homo sapiens
gagaatgaggaagaaggagga

SEQ ID NO: 4073 - RNA, 21 nt, RNAi-sense strand
gaaugaggaagaaggaggauu

SEQ ID NO: 4074 - RNA, 21 nt, RNAi-antisense strand
uccuccuucuuccucauucuu

SEQ ID NO: 4075 - DNA, 21 bp, Homo sapiens
gaatgaggaagaaggaggaga

SEQ ID NO: 4076 - RNA, 21 nt, RNAi-sense strand
augaggaagaaggaggagauu

SEQ ID NO: 4077 - RNA, 21 nt, RNAi-antisense strand
ucuccuccuucuuccucauuu

SEQ ID NO: 4078 - DNA, 21 bp, Homo sapiens
gaggaagaaggaggagaggaa

SEQ ID NO: 4079 - RNA, 21 nt, RNAi-sense strand
ggaagaaggaggagaggaauu

SEQ ID NO: 4080 - RNA, 21 nt, RNAi-antisense strand
uuccucuccuccuucuuccuu

SEQ ID NO: 4081 - DNA, 21 bp, Homo sapiens
gaagaaggaggagaggaaggc

SEQ ID NO: 4082 - RNA, 21 nt, RNAi-sense strand
agaaggaggagaggaaggcuu

SEQ ID NO: 4083 - RNA, 21 nt, RNAi-antisense strand
gccuuccucuccuccuucuuu

SEQ ID NO: 4084 - DNA, 21 bp, Homo sapiens
gaaggaggagaggaaggcaaa

SEQ ID NO: 4085 - RNA, 21 nt, RNAi-sense strand
aggaggagaggaaggcaaauu

SEQ ID NO: 4086 - RNA, 21 nt, RNAi-antisense strand
uuugccuuccucuccuccuuu

SEQ ID NO: 4087 - DNA, 21 bp, Homo sapiens
gaggagaggaaggcaaacgaa

SEQ ID NO: 4088 - RNA, 21 nt, RNAi-sense strand
ggagaggaaggcaaacgaauu

SEQ ID NO: 4089 - RNA, 21 nt, RNAi-antisense strand
uucguuugccuuccucuccuu

SEQ ID NO: 4090 - DNA, 21 bp, Homo sapiens
gagaggaaggcaaacgaaata

SEQ ID NO: 4091 - RNA, 21 nt, RNAi-sense strand
gaggaaggcaaacgaaauauu

SEQ ID NO: 4092 - RNA, 21 nt, RNAi-antisense strand
uauuucguuugccuuccucuu

SEQ ID NO: 4093 - DNA, 21 bp, Homo sapiens
gaggaaggcaaacgaaatact

SEQ ID NO: 4094 - RNA, 21 nt, RNAi-sense strand
ggaaggcaaacgaaauacuuu

SEQ ID NO: 4095 - RNA, 21 nt, RNAi-antisense strand
aguauuucguuugccuuccuu

SEQ ID NO: 4096 - DNA, 21 bp, Homo sapiens
gaaggcaaacgaaatactagc

SEQ ID NO: 4097 - RNA, 21 nt, RNAi-sense strand
aggcaaacgaaauacuagcuu

SEQ ID NO: 4098 - RNA, 21 nt, RNAi-antisense strand
gcuaguauuucguuugccuuu

SEQ ID NO: 4099 - DNA, 21 bp, Homo sapiens
gagactgagtctgtgaacaca

SEQ ID NO: 4100 - RNA, 21 nt, RNAi-sense strand
gacugagucugugaacacauu

SEQ ID NO: 4101 - RNA, 21 nt, RNAi-antisense strand
uguguucacagacucagucuu

SEQ ID NO: 4102 - DNA, 21 bp, Homo sapiens
gactgagtctgtgaacacaga

SEQ ID NO: 4103 - RNA, 21 nt, RNAi-sense strand
cugagucugugaacacagauu

SEQ ID NO: 4104 - RNA, 21 nt, RNAi-antisense strand
ucuguguucacagacucaguu

SEQ ID NO: 4105 - DNA, 21 bp, Homo sapiens
gagtctgtgaacacagagaac

SEQ ID NO: 4106 - RNA, 21 nt, RNAi-sense strand
gucugugaacacagagaacuu

SEQ ID NO: 4107 - RNA, 21 nt, RNAi-antisense strand
guucucuguguucacagacuu

SEQ ID NO: 4108 - DNA, 21 bp, Homo sapiens
gaacacagagaacgtcagcgg

SEQ ID NO: 4109 - RNA, 21 nt, RNAi-sense strand
acacagagaacgucagcgguu

SEQ ID NO: 4110 - RNA, 21 nt, RNAi-antisense strand
ccgcugacguucucuguguuu

SEQ ID NO: 4111 - DNA, 21 bp, Homo sapiens
gagaacgtcagcggtgaaggc

SEQ ID NO: 4112 - RNA, 21 nt, RNAi-sense strand
gaacgucagcggugaaggcuu

SEQ ID NO: 4113 - RNA, 21 nt, RNAi-antisense strand
gccuucaccgcugacguucuu

SEQ ID NO: 4114 - DNA, 21 bp, Homo sapiens
gaacgtcagcggtgaaggcga

SEQ ID NO: 4115 - RNA, 21 nt, RNAi-sense strand
acgucagcggugaaggcgauu

SEQ ID NO: 4116 - RNA, 21 nt, RNAi-antisense strand
ucgccuucaccgcugacguuu

SEQ ID NO: 4117 - DNA, 21 bp, Homo sapiens
gagaaccgaggctgctgtgga

SEQ ID NO: 4118 - RNA, 21 nt, RNAi-sense strand
gaaccgaggcugcuguggauu

SEQ ID NO: 4119 - RNA, 21 nt, RNAi-antisense strand
uccacagcagccucgguucuu

SEQ ID NO: 4120 - DNA, 21 bp, Homo sapiens
gaaccgaggctgctgtggaag

SEQ ID NO: 4121 - RNA, 21 nt, RNAi-sense strand
accgaggcugcuguggaaguu

SEQ ID NO: 4122 - RNA, 21 nt, RNAi-antisense strand
cuuccacagcagccucgguuu

SEQ ID NO: 4123 - DNA, 21 bp, Homo sapiens
gaggctgctgtggaagtctct

SEQ ID NO: 4124 - RNA, 21 nt, RNAi-sense strand
ggcugcuguggaagucucuuu

SEQ ID NO: 4125 - RNA, 21 nt, RNAi-antisense strand
agagacuuccacagcagccuu

SEQ ID NO: 4126 - DNA, 21 bp, Homo sapiens
gaagtctctggtgctggtgga

SEQ ID NO: 4127 - RNA, 21 nt, RNAi-sense strand
agucucuggugcugguggauu

SEQ ID NO: 4128 - RNA, 21 nt, RNAi-antisense strand
uccaccagcaccagagacuuu

SEQ ID NO: 4129 - DNA, 21 bp, Homo sapiens
gaaccgattcaatcgcagaag

SEQ ID NO: 4130 - RNA, 21 nt, RNAi-sense strand
accgauucaaucgcagaaguu

SEQ ID NO: 4131 - RNA, 21 nt, RNAi-antisense strand
cuucugcgauugaaucgguuu

SEQ ID NO: 4132 - DNA, 21 bp, Homo sapiens
gattcaatcgcagaagatgta

SEQ ID NO: 4133 - RNA, 21 nt, RNAi-sense strand
uucaaucgcagaagauguauu

SEQ ID NO: 4134 - RNA, 21 nt, RNAi-antisense strand
uacaucuucugcgauugaauu

SEQ ID NO: 4135 - DNA, 21 bp, Homo sapiens
gaacaccttaaccatttcctc

SEQ ID NO: 4136 - RNA, 21 nt, RNAi-sense strand
acaccuuaaccauuuccucuu

SEQ ID NO: 4137 - RNA, 21 nt, RNAi-antisense strand
gaggaaaugguuaagguguuu

SEQ ID NO: 4138 - DNA, 21 bp, Homo sapiens
gagcactacaatcagccagat

SEQ ID NO: 4139 - RNA, 21 nt, RNAi-sense strand
gcacuacaaucagccagauuu

SEQ ID NO: 4140 - RNA, 21 nt, RNAi-antisense strand
aucuggcugauuguagugcuu

SEQ ID NO: 4141 - DNA, 21 bp, Homo sapiens
gattggttgacacagattcaa

SEQ ID NO: 4142 - RNA, 21 nt, RNAi-sense strand
uugguugacacagauucaauu

SEQ ID NO: 4143 - RNA, 21 nt, RNAi-antisense strand
uugaaucugugucaaccaauu

SEQ ID NO: 4144 - DNA, 21 bp, Homo sapiens
gacacagattcaagatattgc

SEQ ID NO: 4145 - RNA, 21 nt, RNAi-sense strand
cacagauucaagauauugcuu

SEQ ID NO: 4146 - RNA, 21 nt, RNAi-antisense strand
gcaauaucuugaaucuguguu

SEQ ID NO: 4147 - DNA, 21 bp, Homo sapiens
gattcaagatattgccaacaa

SEQ ID NO: 4148 - RNA, 21 nt, RNAi-sense strand
uucaagauauugccaacaauu

SEQ ID NO: 4149 - RNA, 21 nt, RNAi-antisense strand
uuguuggcaauaucuugaauu

SEQ ID NO: 4150 - DNA, 21 bp, Homo sapiens
gatattgccaacaaagtcctc

SEQ ID NO: 4151 - RNA, 21 nt, RNAi-sense strand
uauugccaacaaaguccucuu

SEQ ID NO: 4152 - RNA, 21 nt, RNAi-antisense strand
gaggacuuuguuggcaauauu

SEQ ID NO: 4153 - DNA, 21 bp, Homo sapiens
gattgcttcgtggtgtgtggt

SEQ ID NO: 4154 - RNA, 21 nt, RNAi-sense strand
uugcuucguggugugugguuu

SEQ ID NO: 4155 - RNA, 21 nt, RNAi-antisense strand
accacacaccacgaagcaauu

SEQ ID NO: 4156 - DNA, 21 bp, Homo sapiens
gaatcactgagacgatcctgg

SEQ ID NO: 4157 - RNA, 21 nt, RNAi-sense strand
aucacugagacgauccugguu

SEQ ID NO: 4158 - RNA, 21 nt, RNAi-antisense strand
ccaggaucgucucagugauuu

SEQ ID NO: 4159 - DNA, 21 bp, Homo sapiens
gagacgatcctggtggaactg

SEQ ID NO: 4160 - RNA, 21 nt, RNAi-sense strand
gacgauccugguggaacuguu

SEQ ID NO: 4161 - RNA, 21 nt, RNAi-antisense strand
caguuccaccaggaucgucuu

SEQ ID NO: 4162 - DNA, 21 bp, Homo sapiens
gacgatcctggtggaactgga

SEQ ID NO: 4163 - RNA, 21 nt, RNAi-sense strand
cgauccugguggaacuggauu

SEQ ID NO: 4164 - RNA, 21 nt, RNAi-antisense strand
uccaguuccaccaggaucguu

SEQ ID NO: 4165 - DNA, 21 bp, Homo sapiens
gatcctggtggaactggaaat

SEQ ID NO: 4166 - RNA, 21 nt, RNAi-sense strand
uccugguggaacuggaaauuu

SEQ ID NO: 4167 - RNA, 21 nt, RNAi-antisense strand
auuuccaguuccaccaggauu

SEQ ID NO: 4168 - DNA, 21 bp, Homo sapiens
gatctctgtgtttcggtgtgt

SEQ ID NO: 4169 - RNA, 21 nt, RNAi-sense strand
ucucuguguuucgguguguuu

SEQ ID NO: 4170 - RNA, 21 nt, RNAi-antisense strand
acacaccgaaacacagagauu

SEQ ID NO: 4171 - DNA, 21 bp, Homo sapiens
gaatcttcaaagtgaccaggc

SEQ ID NO: 4172 - RNA, 21 nt, RNAi-sense strand
aucuucaaagugaccaggcuu

SEQ ID NO: 4173 - RNA, 21 nt, RNAi-antisense strand
gccuggucacuuugaagauuu

SEQ ID NO: 4174 - DNA, 21 bp, Homo sapiens
gagcaacttagtggcatcctt

SEQ ID NO: 4175 - RNA, 21 nt, RNAi-sense strand
gcaacuuaguggcauccuuuu

SEQ ID NO: 4176 - RNA, 21 nt, RNAi-antisense strand
aaggaugccacuaaguugcuu

SEQ ID NO: 4177 - DNA, 21 bp, Homo sapiens
gaagtccatcgcttcgctgtt

SEQ ID NO: 4178 - RNA, 21 nt, RNAi-sense strand
aguccaucgcuucgcuguuuu

SEQ ID NO: 4179 - RNA, 21 nt, RNAi-antisense strand
aacagcgaagcgauggacuuu

SEQ ID NO: 4180 - DNA, 21 bp, Homo sapiens
gatgcagctgtttggcggcaa

SEQ ID NO: 4181 - RNA, 21 nt, RNAi-sense strand
ugcagcuguuuggcggcaauu

SEQ ID NO: 4182 - RNA, 21 nt, RNAi-antisense strand
uugccgccaaacagcugcauu

SEQ ID NO: 4183 - DNA, 21 bp, Homo sapiens
gatgaaacgcaaaccaagcgg

SEQ ID NO: 4184 - RNA, 21 nt, RNAi-sense strand
ugaaacgcaaaccaagcgguu

SEQ ID NO: 4185 - RNA, 21 nt, RNAi-antisense strand
ccgcuugguuugcguuucauu

SEQ ID NO: 4186 - DNA, 21 bp, Homo sapiens
gaaacgcaaaccaagcggagc

SEQ ID NO: 4187 - RNA, 21 nt, RNAi-sense strand
aacgcaaaccaagcggagcuu

SEQ ID NO: 4188 - RNA, 21 nt, RNAi-antisense strand
gcuccgcuugguuugcguuuu

SEQ ID NO: 4189 - DNA, 21 bp, Homo sapiens
gatcctgacaggcgaagactg

SEQ ID NO: 4190 - RNA, 21 nt, RNAi-sense strand
uccugacaggcgaagacuguu

SEQ ID NO: 4191 - RNA, 21 nt, RNAi-antisense strand
cagucuucgccugucaggauu

SEQ ID NO: 4192 - DNA, 21 bp, Homo sapiens
gacaggcgaagactggaatgc

SEQ ID NO: 4193 - RNA, 21 nt, RNAi-sense strand
caggcgaagacuggaaugcuu

SEQ ID NO: 4194 - RNA, 21 nt, RNAi-antisense strand
gcauuccagucuucgccuguu

SEQ ID NO: 4195 - DNA, 21 bp, Homo sapiens
gaagactggaatgctgtgatg

SEQ ID NO: 4196 - RNA, 21 nt, RNAi-sense strand
agacuggaaugcugugauguu

SEQ ID NO: 4197 - RNA, 21 nt, RNAi-antisense strand
caucacagcauuccagucuuu

SEQ ID NO: 4198 - DNA, 21 bp, Homo sapiens
gactggaatgctgtgatgtac

SEQ ID NO: 4199 - RNA, 21 nt, RNAi-sense strand
cuggaaugcugugauguacuu

SEQ ID NO: 4200 - RNA, 21 nt, RNAi-antisense strand
guacaucacagcauuccaguu

SEQ ID NO: 4201 - DNA, 21 bp, Homo sapiens
gaatgctgtgatgtacgatgg

SEQ ID NO: 4202 - RNA, 21 nt, RNAi-sense strand
augcugugauguacgaugguu

SEQ ID NO: 4203 - RNA, 21 nt, RNAi-antisense strand
ccaucguacaucacagcauuu

SEQ ID NO: 4204 - DNA, 21 bp, Homo sapiens
gatgtacgatggcatcatggc

SEQ ID NO: 4205 - RNA, 21 nt, RNAi-sense strand
uguacgauggcaucauggcuu

SEQ ID NO: 4206 - RNA, 21 nt, RNAi-antisense strand
gccaugaugccaucguacauu

SEQ ID NO: 4207 - DNA, 21 bp, Homo sapiens
gaatgatcgtctgcatctact

SEQ ID NO: 4208 - RNA, 21 nt, RNAi-sense strand
augaucgucugcaucuacuuu

SEQ ID NO: 4209 - RNA, 21 nt, RNAi-antisense strand
aguagaugcagacgaucauuu

SEQ ID NO: 4210 - DNA, 21 bp, Homo sapiens
gatcgtctgcatctacttcat

SEQ ID NO: 4211 - RNA, 21 nt, RNAi-sense strand
ucgucugcaucuacuucauuu

SEQ ID NO: 4212 - RNA, 21 nt, RNAi-antisense strand
augaaguagaugcagacgauu

SEQ ID NO: 4213 - DNA, 21 bp, Homo sapiens
gaatgtcttcttggccatcgc

SEQ ID NO: 4214 - RNA, 21 nt, RNAi-sense strand
augucuucuuggccaucgcuu

SEQ ID NO: 4215 - RNA, 21 nt, RNAi-antisense strand
gcgauggccaagaagacauuu

SEQ ID NO: 4216 - DNA, 21 bp, Homo sapiens
gacaatttggctgatgctgaa

SEQ ID NO: 4217 - RNA, 21 nt, RNAi-sense strand
caauuuggcugaugcugaauu

SEQ ID NO: 4218 - RNA, 21 nt, RNAi-antisense strand
uucagcaucagccaaauuguu

SEQ ID NO: 4219 - DNA, 21 bp, Homo sapiens
gatgctgaaagtctgaacact

SEQ ID NO: 4220 - RNA, 21 nt, RNAi-sense strand
ugcugaaagucugaacacuuu

SEQ ID NO: 4221 - RNA, 21 nt, RNAi-antisense strand
aguguucagacuuucagcauu

SEQ ID NO: 4222 - DNA, 21 bp, Homo sapiens
gaaagtctgaacactgctcag

SEQ ID NO: 4223 - RNA, 21 nt, RNAi-sense strand
aagucugaacacugcucaguu

SEQ ID NO: 4224 - RNA, 21 nt, RNAi-antisense strand
cugagcaguguucagacuuuu

SEQ ID NO: 4225 - DNA, 21 bp, Homo sapiens
gaacactgctcagaaagaaga

SEQ ID NO: 4226 - RNA, 21 nt, RNAi-sense strand
acacugcucagaaagaagauu

SEQ ID NO: 4227 - RNA, 21 nt, RNAi-antisense strand
ucuucuuucugagcaguguuu

SEQ ID NO: 4228 - DNA, 21 bp, Homo sapiens
gaacaacaaaccagaagtcaa

SEQ ID NO: 4229 - RNA, 21 nt, RNAi-sense strand
acaacaaaccagaagucaauu

SEQ ID NO: 4230 - RNA, 21 nt, RNAi-antisense strand
uugacuucugguuuguuguuu

SEQ ID NO: 4231 - DNA, 21 bp, Homo sapiens
gaagtcaaccagatagccaac

SEQ ID NO: 4232 - RNA, 21 nt, RNAi-sense strand
agucaaccagauagccaacuu

SEQ ID NO: 4233 - RNA, 21 nt, RNAi-antisense strand
guuggcuaucugguugacuuu

SEQ ID NO: 4234 - DNA, 21 bp, Homo sapiens
gatagccaacagtgacaacaa

SEQ ID NO: 4235 - RNA, 21 nt, RNAi-sense strand
uagccaacagugacaacaauu

SEQ ID NO: 4236 - RNA, 21 nt, RNAi-antisense strand
uuguugucacuguuggcuauu

SEQ ID NO: 4237 - DNA, 21 bp, Homo sapiens
gacaacaaggttacaattgat

SEQ ID NO: 4238 - RNA, 21 nt, RNAi-sense strand
caacaagguuacaauugauuu

SEQ ID NO: 4239 - RNA, 21 nt, RNAi-antisense strand
aucaauuguaaccuuguuguu

SEQ ID NO: 4240 - DNA, 21 bp, Homo sapiens
gatgactatagagaagaggat

SEQ ID NO: 4241 - RNA, 21 nt, RNAi-sense strand
ugacuauagagaagaggauuu

SEQ ID NO: 4242 - RNA, 21 nt, RNAi-antisense strand
auccucuucucuauagucauu

SEQ ID NO: 4243 - DNA, 21 bp, Homo sapiens
gactatagagaagaggatgaa

SEQ ID NO: 4244 - RNA, 21 nt, RNAi-sense strand
cuauagagaagaggaugaauu

SEQ ID NO: 4245 - RNA, 21 nt, RNAi-antisense strand
uucauccucuucucuauaguu

SEQ ID NO: 4246 - DNA, 21 bp, Homo sapiens
gagaagaggatgaagacaagg

SEQ ID NO: 4247 - RNA, 21 nt, RNAi-sense strand
gaagaggaugaagacaagguu

SEQ ID NO: 4248 - RNA, 21 nt, RNAi-antisense strand
ccuugucuucauccucuucuu

SEQ ID NO: 4249 - DNA, 21 bp, Homo sapiens
gaagaggatgaagacaaggac

SEQ ID NO: 4250 - RNA, 21 nt, RNAi-sense strand
agaggaugaagacaaggacuu

SEQ ID NO: 4251 - RNA, 21 nt, RNAi-antisense strand
guccuugucuucauccucuuu

SEQ ID NO: 4252 - DNA, 21 bp, Homo sapiens
gaagaggaagaggaagaggag

SEQ ID NO: 4253 - RNA, 21 nt, RNAi-sense strand
agaggaagaggaagaggaguu

SEQ ID NO: 4254 - RNA, 21 nt, RNAi-antisense strand
cuccucuuccucuuccucuuu

SEQ ID NO: 4255 - DNA, 21 bp, Homo sapiens
gaggaagaggaagaggaggag

SEQ ID NO: 4256 - RNA, 21 nt, RNAi-sense strand
ggaagaggaagaggaggaguu

SEQ ID NO: 4257 - RNA, 21 nt, RNAi-antisense strand
cuccuccucuuccucuuccuu

SEQ ID NO: 4258 - DNA, 21 bp, Homo sapiens
gaagaggaagaggaggaggat

SEQ ID NO: 4259 - RNA, 21 nt, RNAi-sense strand
agaggaagaggaggaggauuu

SEQ ID NO: 4260 - RNA, 21 nt, RNAi-antisense strand
auccuccuccucuuccucuuu

SEQ ID NO: 4261 - DNA, 21 bp, Homo sapiens
gaggaagaggaggaggatgaa

SEQ ID NO: 4262 - RNA, 21 nt, RNAi-sense strand
ggaagaggaggaggaugaauu

SEQ ID NO: 4263 - RNA, 21 nt, RNAi-antisense strand
uucauccuccuccucuuccuu

SEQ ID NO: 4264 - DNA, 21 bp, Homo sapiens
gaagaggaggaggatgaacct

SEQ ID NO: 4265 - RNA, 21 nt, RNAi-sense strand
agaggaggaggaugaaccuuu

SEQ ID NO: 4266 - RNA, 21 nt, RNAi-antisense strand
agguucauccuccuccucuuu

SEQ ID NO: 4267 - DNA, 21 bp, Homo sapiens
gaggaggaggatgaacctgag

SEQ ID NO: 4268 - RNA, 21 nt, RNAi-sense strand
ggaggaggaugaaccugaguu

SEQ ID NO: 4269 - RNA, 21 nt, RNAi-antisense strand
cucagguucauccuccuccuu

SEQ ID NO: 4270 - DNA, 21 bp, Homo sapiens
gaggaggatgaacctgaggtt

SEQ ID NO: 4271 - RNA, 21 nt, RNAi-sense strand
ggaggaugaaccugagguuuu

SEQ ID NO: 4272 - RNA, 21 nt, RNAi-antisense strand
aaccucagguucauccuccuu

SEQ ID NO: 4273 - DNA, 21 bp, Homo sapiens
gaggatgaacctgaggttcct

SEQ ID NO: 4274 - RNA, 21 nt, RNAi-sense strand
ggaugaaccugagguuccuuu

SEQ ID NO: 4275 - RNA, 21 nt, RNAi-antisense strand
aggaaccucagguucauccuu

SEQ ID NO: 4276 - DNA, 21 bp, Homo sapiens
gatgaacctgaggttcctgcc

SEQ ID NO: 4277 - RNA, 21 nt, RNAi-sense strand
ugaaccugagguuccugccuu

SEQ ID NO: 4278 - RNA, 21 nt, RNAi-antisense strand
ggcaggaaccucagguucauu

SEQ ID NO: 4279 - DNA, 21 bp, Homo sapiens
gaacctgaggttcctgccgga

SEQ ID NO: 4280 - RNA, 21 nt, RNAi-sense strand
accugagguuccugccggauu

SEQ ID NO: 4281 - RNA, 21 nt, RNAi-antisense strand
uccggcaggaaccucagguuu

SEQ ID NO: 4282 - DNA, 21 bp, Homo sapiens
gaaggatctcggagttgaaca

SEQ ID NO: 4283 - RNA, 21 nt, RNAi-sense strand
aggaucucggaguugaacauu

SEQ ID NO: 4284 - RNA, 21 nt, RNAi-antisense strand
uguucaacuccgagauccuuu

SEQ ID NO: 4285 - DNA, 21 bp, Homo sapiens
gatctcggagttgaacatgaa

SEQ ID NO: 4286 - RNA, 21 nt, RNAi-sense strand
ucucggaguugaacaugaauu

SEQ ID NO: 4287 - RNA, 21 nt, RNAi-antisense strand
uucauguucaacuccgagauu

SEQ ID NO: 4288 - DNA, 21 bp, Homo sapiens
gagcgctttcttcattcttag

SEQ ID NO: 4289 - RNA, 21 nt, RNAi-sense strand
gcgcuuucuucauucuuaguu

SEQ ID NO: 4290 - RNA, 21 nt, RNAi-antisense strand
cuaagaaugaagaaagcgcuu

SEQ ID NO: 4291 - DNA, 21 bp, Homo sapiens
gatccgcgtaggctgccacaa

SEQ ID NO: 4292 - RNA, 21 nt, RNAi-sense strand
uccgcguaggcugccacaauu

SEQ ID NO: 4293 - RNA, 21 nt, RNAi-antisense strand
uuguggcagccuacgcggauu

SEQ ID NO: 4294 - DNA, 21 bp, Homo sapiens
gactatgccttcacagccatc

SEQ ID NO: 4295 - RNA, 21 nt, RNAi-sense strand
cuaugccuucacagccaucuu

SEQ ID NO: 4296 - RNA, 21 nt, RNAi-antisense strand
gauggcugugaaggcauaguu

SEQ ID NO: 4297 - DNA, 21 bp, Homo sapiens
gagatcctgttgaagatgaca

SEQ ID NO: 4298 - RNA, 21 nt, RNAi-sense strand
gauccuguugaagaugacauu

SEQ ID NO: 4299 - RNA, 21 nt, RNAi-antisense strand
ugucaucuucaacaggaucuu

SEQ ID NO: 4300 - DNA, 21 bp, Homo sapiens
gatcctgttgaagatgacaac

SEQ ID NO: 4301 - RNA, 21 nt, RNAi-sense strand
uccuguugaagaugacaacuu

SEQ ID NO: 4302 - RNA, 21 nt, RNAi-antisense strand
guugucaucuucaacaggauu

SEQ ID NO: 4303 - DNA, 21 bp, Homo sapiens
gaactacttcaatttgctgga

SEQ ID NO: 4304 - RNA, 21 nt, RNAi-sense strand
acuacuucaauuugcuggauu

SEQ ID NO: 4305 - RNA, 21 nt, RNAi-antisense strand
uccagcaaauugaaguaguuu

SEQ ID NO: 4306 - DNA, 21 bp, Homo sapiens
gattcaatccagtgccatctc

SEQ ID NO: 4307 - RNA, 21 nt, RNAi-sense strand
uucaauccagugccaucucuu

SEQ ID NO: 4308 - RNA, 21 nt, RNAi-antisense strand
gagauggcacuggauugaauu

SEQ ID NO: 4309 - DNA, 21 bp, Homo sapiens
gacttaagcacgtggtccagt

SEQ ID NO: 4310 - RNA, 21 nt, RNAi-sense strand
cuuaagcacgugguccaguuu

SEQ ID NO: 4311 - RNA, 21 nt, RNAi-antisense strand
acuggaccacgugcuuaaguu

SEQ ID NO: 4312 - DNA, 21 bp, Homo sapiens
gaccatcggcaacatcatgat

SEQ ID NO: 4313 - RNA, 21 nt, RNAi-sense strand
ccaucggcaacaucaugauuu

SEQ ID NO: 4314 - RNA, 21 nt, RNAi-antisense strand
aucaugauguugccgaugguu

SEQ ID NO: 4315 - DNA, 21 bp, Homo sapiens
gaagttctatcgctgtacgga

SEQ ID NO: 4316 - RNA, 21 nt, RNAi-sense strand
aguucuaucgcuguacggauu

SEQ ID NO: 4317 - RNA, 21 nt, RNAi-antisense strand
uccguacagcgauagaacuuu

SEQ ID NO: 4318 - DNA, 21 bp, Homo sapiens
gatgttgacagtcctgtggtc

SEQ ID NO: 4319 - RNA, 21 nt, RNAi-sense strand
uguugacaguccuguggucuu

SEQ ID NO: 4320 - RNA, 21 nt, RNAi-antisense strand
gaccacaggacugucaacauu

SEQ ID NO: 4321 - DNA, 21 bp, Homo sapiens
gacagtcctgtggtccgtgaa

SEQ ID NO: 4322 - RNA, 21 nt, RNAi-sense strand
caguccugugguccgugaauu

SEQ ID NO: 4323 - RNA, 21 nt, RNAi-antisense strand
uucacggaccacaggacuguu

SEQ ID NO: 4324 - DNA, 21 bp, Homo sapiens
gatttcaacttcgacaacgtc

SEQ ID NO: 4325 - RNA, 21 nt, RNAi-sense strand
uuucaacuucgacaacgucuu

SEQ ID NO: 4326 - RNA, 21 nt, RNAi-antisense strand
gacguugucgaaguugaaauu

SEQ ID NO: 4327 - DNA, 21 bp, Homo sapiens
gacaacgtcctctctgctatg

SEQ ID NO: 4328 - RNA, 21 nt, RNAi-sense strand
caacguccucucugcuauguu

SEQ ID NO: 4329 - RNA, 21 nt, RNAi-antisense strand
cauagcagagaggacguuguu

SEQ ID NO: 4330 - DNA, 21 bp, Homo sapiens
gatggcgctcttcacagtctc

SEQ ID NO: 4331 - RNA, 21 nt, RNAi-sense strand
uggcgcucuucacagucucuu

SEQ ID NO: 4332 - RNA, 21 nt, RNAi-antisense strand
gagacugugaagagcgccauu

SEQ ID NO: 4333 - DNA, 21 bp, Homo sapiens
gactcgaatggagagaacatc

SEQ ID NO: 4334 - RNA, 21 nt, RNAi-sense strand
cucgaauggagagaacaucuu

SEQ ID NO: 4335 - RNA, 21 nt, RNAi-antisense strand
gauguucucuccauucgaguu

SEQ ID NO: 4336 - DNA, 21 bp, Homo sapiens
gagatctccatcttcttcatc

SEQ ID NO: 4337 - RNA, 21 nt, RNAi-sense strand
gaucuccaucuucuucaucuu

SEQ ID NO: 4338 - RNA, 21 nt, RNAi-antisense strand
gaugaagaagauggagaucuu

SEQ ID NO: 4339 - DNA, 21 bp, Homo sapiens
gatctccatcttcttcatcat

SEQ ID NO: 4340 - RNA, 21 nt, RNAi-sense strand
ucuccaucuucuucaucauuu

SEQ ID NO: 4341 - RNA, 21 nt, RNAi-antisense strand
augaugaagaagauggagauu

SEQ ID NO: 4342 - DNA, 21 bp, Homo sapiens
gagtataagaactgtgagctg

SEQ ID NO: 4343 - RNA, 21 nt, RNAi-sense strand
guauaagaacugugagcuguu

SEQ ID NO: 4344 - RNA, 21 nt, RNAi-antisense strand
cagcucacaguucuuauacuu

SEQ ID NO: 4345 - DNA, 21 bp, Homo sapiens
gaatacgccttgaaagcacgt

SEQ ID NO: 4346 - RNA, 21 nt, RNAi-sense strand
auacgccuugaaagcacguuu

SEQ ID NO: 4347 - RNA, 21 nt, RNAi-antisense strand
acgugcuuucaaggcguauuu

SEQ ID NO: 4348 - DNA, 21 bp, Homo sapiens
gaactcttcgcctttcgaata

SEQ ID NO: 4349 - RNA, 21 nt, RNAi-sense strand
acucuucgccuuucgaauauu

SEQ ID NO: 4350 - RNA, 21 nt, RNAi-antisense strand
uauucgaaaggcgaagaguuu

SEQ ID NO: 4351 - DNA, 21 bp, Homo sapiens
gaatacatgatgtttgtcctc

SEQ ID NO: 4352 - RNA, 21 nt, RNAi-sense strand
auacaugauguuuguccucuu

SEQ ID NO: 4353 - RNA, 21 nt, RNAi-antisense strand
gaggacaaacaucauguauuu

SEQ ID NO: 4354 - DNA, 21 bp, Homo sapiens
gatgtttgtcctcatcatgct

SEQ ID NO: 4355 - RNA, 21 nt, RNAi-sense strand
uguuuguccucaucaugcuuu

SEQ ID NO: 4356 - RNA, 21 nt, RNAi-antisense strand
agcaugaugaggacaaacauu

SEQ ID NO: 4357 - DNA, 21 bp, Homo sapiens
gagcagtccaagatgttcaat

SEQ ID NO: 4358 - RNA, 21 nt, RNAi-sense strand
gcaguccaagauguucaauuu

SEQ ID NO: 4359 - RNA, 21 nt, RNAi-antisense strand
auugaacaucuuggacugcuu

SEQ ID NO: 4360 - DNA, 21 bp, Homo sapiens
gatgttcaatgatgccatgga

SEQ ID NO: 4361 - RNA, 21 nt, RNAi-sense strand
uguucaaugaugccauggauu

SEQ ID NO: 4362 - RNA, 21 nt, RNAi-antisense strand
uccauggcaucauugaacauu

SEQ ID NO: 4363 - DNA, 21 bp, Homo sapiens
gatgccatggacattctgaac

SEQ ID NO: 4364 - RNA, 21 nt, RNAi-sense strand
ugccauggacauucugaacuu

SEQ ID NO: 4365 - RNA, 21 nt, RNAi-antisense strand
guucagaauguccauggcauu

SEQ ID NO: 4366 - DNA, 21 bp, Homo sapiens
gacattctgaacatggtcttc

SEQ ID NO: 4367 - RNA, 21 nt, RNAi-sense strand
cauucugaacauggucuucuu

SEQ ID NO: 4368 - RNA, 21 nt, RNAi-antisense strand
gaagaccauguucagaauguu

SEQ ID NO: 4369 - DNA, 21 bp, Homo sapiens
gaaagtcatcgcatttaagcc

SEQ ID NO: 4370 - RNA, 21 nt, RNAi-sense strand
aagucaucgcauuuaagccuu

SEQ ID NO: 4371 - RNA, 21 nt, RNAi-antisense strand
ggcuuaaaugcgaugacuuuu

SEQ ID NO: 4372 - DNA, 21 bp, Homo sapiens
gacgcctggaacacgtttgac

SEQ ID NO: 4373 - RNA, 21 nt, RNAi-sense strand
cgccuggaacacguuugacuu

SEQ ID NO: 4374 - RNA, 21 nt, RNAi-antisense strand
gucaaacguguuccaggcguu

SEQ ID NO: 4375 - DNA, 21 bp, Homo sapiens
gaactctgaagagagcaatag

SEQ ID NO: 4376 - RNA, 21 nt, RNAi-sense strand
acucugaagagagcaauaguu

SEQ ID NO: 4377 - RNA, 21 nt, RNAi-antisense strand
cuauugcucucuucagaguuu

SEQ ID NO: 4378 - DNA, 21 bp, Homo sapiens
gaagagagcaatagaatctcc

SEQ ID NO: 4379 - RNA, 21 nt, RNAi-sense strand
agagagcaauagaaucuccuu

SEQ ID NO: 4380 - RNA, 21 nt, RNAi-antisense strand
ggagauucuauugcucucuuu

SEQ ID NO: 4381 - DNA, 21 bp, Homo sapiens
gagagcaatagaatctccatc

SEQ ID NO: 4382 - RNA, 21 nt, RNAi-sense strand
gagcaauagaaucuccaucuu

SEQ ID NO: 4383 - RNA, 21 nt, RNAi-antisense strand
gauggagauucuauugcucuu

SEQ ID NO: 4384 - DNA, 21 bp, Homo sapiens
gagcaatagaatctccatcac

SEQ ID NO: 4385 - RNA, 21 nt, RNAi-sense strand
gcaauagaaucuccaucacuu

SEQ ID NO: 4386 - RNA, 21 nt, RNAi-antisense strand
gugauggagauucuauugcuu

SEQ ID NO: 4387 - DNA, 21 bp, Homo sapiens
gagtgatgcgattggtgaagc

SEQ ID NO: 4388 - RNA, 21 nt, RNAi-sense strand
gugaugcgauuggugaagcuu

SEQ ID NO: 4389 - RNA, 21 nt, RNAi-antisense strand
gcuucaccaaucgcaucacuu

SEQ ID NO: 4390 - DNA, 21 bp, Homo sapiens
gatgcgattggtgaagcttct

SEQ ID NO: 4391 - RNA, 21 nt, RNAi-sense strand
ugcgauuggugaagcuucuuu

SEQ ID NO: 4392 - RNA, 21 nt, RNAi-antisense strand
agaagcuucaccaaucgcauu

SEQ ID NO: 4393 - DNA, 21 bp, Homo sapiens
gattggtgaagcttctcagca

SEQ ID NO: 4394 - RNA, 21 nt, RNAi-sense strand
uuggugaagcuucucagcauu

SEQ ID NO: 4395 - RNA, 21 nt, RNAi-antisense strand
ugcugagaagcuucaccaauu

SEQ ID NO: 4396 - DNA, 21 bp, Homo sapiens
gaaggcatccggacattgctg

SEQ ID NO: 4397 - RNA, 21 nt, RNAi-sense strand
aggcauccggacauugcuguu

SEQ ID NO: 4398 - RNA, 21 nt, RNAi-antisense strand
cagcaauguccggaugccuuu

SEQ ID NO: 4399 - DNA, 21 bp, Homo sapiens
gaaagttgccatgagagataa

SEQ ID NO: 4400 - RNA, 21 nt, RNAi-sense strand
aaguugccaugagagauaauu

SEQ ID NO: 4401 - RNA, 21 nt, RNAi-antisense strand
uuaucucucauggcaacuuuu

SEQ ID NO: 4402 - DNA, 21 bp, Homo sapiens
gagagataacaaccagatcaa

SEQ ID NO: 4403 - RNA, 21 nt, RNAi-sense strand
gagauaacaaccagaucaauu

SEQ ID NO: 4404 - RNA, 21 nt, RNAi-antisense strand
uugaucugguuguuaucucuu

SEQ ID NO: 4405 - DNA, 21 bp, Homo sapiens
gagataacaaccagatcaata

SEQ ID NO: 4406 - RNA, 21 nt, RNAi-sense strand
gauaacaaccagaucaauauu

SEQ ID NO: 4407 - RNA, 21 nt, RNAi-antisense strand
uauugaucugguuguuaucuu

SEQ ID NO: 4408 - DNA, 21 bp, Homo sapiens
gataacaaccagatcaatagg

SEQ ID NO: 4409 - RNA, 21 nt, RNAi-sense strand
uaacaaccagaucaauagguu

SEQ ID NO: 4410 - RNA, 21 nt, RNAi-antisense strand
ccuauugaucugguuguuauu

SEQ ID NO: 4411 - DNA, 21 bp, Homo sapiens
gaacaataacttccagacgtt

SEQ ID NO: 4412 - RNA, 21 nt, RNAi-sense strand
acaauaacuuccagacguuuu

SEQ ID NO: 4413 - RNA, 21 nt, RNAi-antisense strand
aacgucuggaaguuauuguuu

SEQ ID NO: 4414 - DNA, 21 bp, Homo sapiens
gaggcctggcaggagatcatg

SEQ ID NO: 4415 - RNA, 21 nt, RNAi-sense strand
ggccuggcaggagaucauguu

SEQ ID NO: 4416 - RNA, 21 nt, RNAi-antisense strand
caugaucuccugccaggccuu

SEQ ID NO: 4417 - DNA, 21 bp, Homo sapiens
gagatcatgctggcctgtctc

SEQ ID NO: 4418 - RNA, 21 nt, RNAi-sense strand
gaucaugcuggccugucucuu

SEQ ID NO: 4419 - RNA, 21 nt, RNAi-antisense strand
gagacaggccagcaugaucuu

SEQ ID NO: 4420 - DNA, 21 bp, Homo sapiens
gagcaactttgccattgtcta

SEQ ID NO: 4421 - RNA, 21 nt, RNAi-sense strand
gcaacuuugccauugucuauu

SEQ ID NO: 4422 - RNA, 21 nt, RNAi-antisense strand
uagacaauggcaaaguugcuu

SEQ ID NO: 4423 - DNA, 21 bp, Homo sapiens
gatcatcaatctgtttgtggc

SEQ ID NO: 4424 - RNA, 21 nt, RNAi-sense strand
ucaucaaucuguuuguggcuu

SEQ ID NO: 4425 - RNA, 21 nt, RNAi-antisense strand
gccacaaacagauugaugauu

SEQ ID NO: 4426 - DNA, 21 bp, Homo sapiens
gataatttcgactatctgacc

SEQ ID NO: 4427 - RNA, 21 nt, RNAi-sense strand
uaauuucgacuaucugaccuu

SEQ ID NO: 4428 - RNA, 21 nt, RNAi-antisense strand
ggucagauagucgaaauuauu

SEQ ID NO: 4429 - DNA, 21 bp, Homo sapiens
gaatatggtcagaatatgacc

SEQ ID NO: 4430 - RNA, 21 nt, RNAi-sense strand
auauggucagaauaugaccuu

SEQ ID NO: 4431 - RNA, 21 nt, RNAi-antisense strand
ggucauauucugaccauauuu

SEQ ID NO: 4432 - DNA, 21 bp, Homo sapiens
gatgtggtcactctgcttcga

SEQ ID NO: 4433 - RNA, 21 nt, RNAi-sense strand
uguggucacucugcuucgauu

SEQ ID NO: 4434 - RNA, 21 nt, RNAi-antisense strand
ucgaagcagagugaccacauu

SEQ ID NO: 4435 - DNA, 21 bp, Homo sapiens
gagattagttgccatgaacat

SEQ ID NO: 4436 - RNA, 21 nt, RNAi-sense strand
gauuaguugccaugaacauuu

SEQ ID NO: 4437 - RNA, 21 nt, RNAi-antisense strand
auguucauggcaacuaaucuu

SEQ ID NO: 4438 - DNA, 21 bp, Homo sapiens
gattagttgccatgaacatgc

SEQ ID NO: 4439 - RNA, 21 nt, RNAi-sense strand
uuaguugccaugaacaugcuu

SEQ ID NO: 4440 - RNA, 21 nt, RNAi-antisense strand
gcauguucauggcaacuaauu

SEQ ID NO: 4441 - DNA, 21 bp, Homo sapiens
gaacatgcctctcaacagtga

SEQ ID NO: 4442 - RNA, 21 nt, RNAi-sense strand
acaugccucucaacagugauu

SEQ ID NO: 4443 - RNA, 21 nt, RNAi-antisense strand
ucacuguugagaggcauguuu

SEQ ID NO: 4444 - DNA, 21 bp, Homo sapiens
gacagtcatgtttaatgcaac

SEQ ID NO: 4445 - RNA, 21 nt, RNAi-sense strand
cagucauguuuaaugcaacuu

SEQ ID NO: 4446 - RNA, 21 nt, RNAi-antisense strand
guugcauuaaacaugacuguu

SEQ ID NO: 4447 - DNA, 21 bp, Homo sapiens
gaacggctcttaagatcaaga

SEQ ID NO: 4448 - RNA, 21 nt, RNAi-sense strand
acggcucuuaagaucaagauu

SEQ ID NO: 4449 - RNA, 21 nt, RNAi-antisense strand
ucuugaucuuaagagccguuu

SEQ ID NO: 4450 - DNA, 21 bp, Homo sapiens
gaacctggagcaagctaatga

SEQ ID NO: 4451 - RNA, 21 nt, RNAi-sense strand
accuggagcaagcuaaugauu

SEQ ID NO: 4452 - RNA, 21 nt, RNAi-antisense strand
ucauuagcuugcuccagguuu

SEQ ID NO: 4453 - DNA, 21 bp, Homo sapiens
gagcaagctaatgaagaactt

SEQ ID NO: 4454 - RNA, 21 nt, RNAi-sense strand
gcaagcuaaugaagaacuuuu

SEQ ID NO: 4455 - RNA, 21 nt, RNAi-antisense strand
aaguucuucauuagcuugcuu

SEQ ID NO: 4456 - DNA, 21 bp, Homo sapiens
gaaattacttgaccaagttgt

SEQ ID NO: 4457 - RNA, 21 nt, RNAi-sense strand
aauuacuugaccaaguuguuu

SEQ ID NO: 4458 - RNA, 21 nt, RNAi-antisense strand
acaacuuggucaaguaauuuu

SEQ ID NO: 4459 - DNA, 21 bp, Homo sapiens
gaagttctatgccactttcct

SEQ ID NO: 4460 - RNA, 21 nt, RNAi-sense strand
aguucuaugccacuuuccuuu

SEQ ID NO: 4461 - RNA, 21 nt, RNAi-antisense strand
aggaaaguggcauagaacuuu

SEQ ID NO: 4462 - DNA, 21 bp, Homo sapiens
gatacaggactactttaggaa

SEQ ID NO: 4463 - RNA, 21 nt, RNAi-sense strand
uacaggacuacuuuaggaauu

SEQ ID NO: 4464 - RNA, 21 nt, RNAi-antisense strand
uuccuaaaguaguccuguauu

SEQ ID NO: 4465 - DNA, 21 bp, Homo sapiens
gactactttaggaaattcaag

SEQ ID NO: 4466 - RNA, 21 nt, RNAi-sense strand
cuacuuuaggaaauucaaguu

SEQ ID NO: 4467 - RNA, 21 nt, RNAi-antisense strand
cuugaauuuccuaaaguaguu

SEQ ID NO: 4468 - DNA, 21 bp, Homo sapiens
gaaattcaagaaacggaaaga

SEQ ID NO: 4469 - RNA, 21 nt, RNAi-sense strand
aauucaagaaacggaaagauu

SEQ ID NO: 4470 - RNA, 21 nt, RNAi-antisense strand
ucuuuccguuucuugaauuuu

SEQ ID NO: 4471 - DNA, 21 bp, Homo sapiens
gaaacggaaagaacaaggact

SEQ ID NO: 4472 - RNA, 21 nt, RNAi-sense strand
aacggaaagaacaaggacuuu

SEQ ID NO: 4473 - RNA, 21 nt, RNAi-antisense strand
aguccuuguucuuuccguuuu

SEQ ID NO: 4474 - DNA, 21 bp, Homo sapiens
gattaaggacactgcatgaca

SEQ ID NO: 4475 - RNA, 21 nt, RNAi-sense strand
uuaaggacacugcaugacauu

SEQ ID NO: 4476 - RNA, 21 nt, RNAi-antisense strand
ugucaugcaguguccuuaauu

SEQ ID NO: 4477 - DNA, 21 bp, Homo sapiens
gaaatccggcgtgctatatcg

SEQ ID NO: 4478 - RNA, 21 nt, RNAi-sense strand
aauccggcgugcuauaucguu

SEQ ID NO: 4479 - RNA, 21 nt, RNAi-antisense strand
cgauauagcacgccggauuuu

SEQ ID NO: 4480 - DNA, 21 bp, Homo sapiens
gatttgcaagatgacgagcct

SEQ ID NO: 4481 - RNA, 21 nt, RNAi-sense strand
uuugcaagaugacgagccuuu

SEQ ID NO: 4482 - RNA, 21 nt, RNAi-antisense strand
aggcucgucaucuugcaaauu

SEQ ID NO: 4483 - DNA, 21 bp, Homo sapiens
gatgacgagcctgaggaaaca

SEQ ID NO: 4484 - RNA, 21 nt, RNAi-sense strand
ugacgagccugaggaaacauu

SEQ ID NO: 4485 - RNA, 21 nt, RNAi-antisense strand
uguuuccucaggcucgucauu

SEQ ID NO: 4486 - DNA, 21 bp, Homo sapiens
gagaagaagaagatgatgtgt

SEQ ID NO: 4487 - RNA, 21 nt, RNAi-sense strand
gaagaagaagaugauguguuu

SEQ ID NO: 4488 - RNA, 21 nt, RNAi-antisense strand
acacaucaucuucuucuucuu

SEQ ID NO: 4489 - DNA, 21 bp, Homo sapiens
gaagaagaagatgatgtgttc

SEQ ID NO: 4490 - RNA, 21 nt, RNAi-sense strand
agaagaagaugauguguucuu

SEQ ID NO: 4491 - RNA, 21 nt, RNAi-antisense strand
gaacacaucaucuucuucuuu

SEQ ID NO: 4492 - DNA, 21 bp, Homo sapiens
gaagaagatgatgtgttcaaa

SEQ ID NO: 4493 - RNA, 21 nt, RNAi-sense strand
agaagaugauguguucaaauu

SEQ ID NO: 4494 - RNA, 21 nt, RNAi-antisense strand
uuugaacacaucaucuucuuu

SEQ ID NO: 4495 - DNA, 21 bp, Homo sapiens
gaaaccatgtcaatcatgtta

SEQ ID NO: 4496 - RNA, 21 nt, RNAi-sense strand
aaccaugucaaucauguuauu

SEQ ID NO: 4497 - RNA, 21 nt, RNAi-antisense strand
uaacaugauugacaugguuuu

SEQ ID NO: 4498 - DNA, 21 bp, Homo sapiens
gatactgagaaaccgctgttt

SEQ ID NO: 4499 - RNA, 21 nt, RNAi-sense strand
uacugagaaaccgcuguuuuu

SEQ ID NO: 4500 - RNA, 21 nt, RNAi-antisense strand
aaacagcgguuucucaguauu

SEQ ID NO: 4501 - DNA, 21 bp, Homo sapiens
gagaaaccgctgtttcctcca

SEQ ID NO: 4502 - RNA, 21 nt, RNAi-sense strand
gaaaccgcuguuuccuccauu

SEQ ID NO: 4503 - RNA, 21 nt, RNAi-antisense strand
uggaggaaacagcgguuucuu

SEQ ID NO: 4504 - DNA, 21 bp, Homo sapiens
gaaaccgctgtttcctccagc

SEQ ID NO: 4505 - RNA, 21 nt, RNAi-sense strand
aaccgcuguuuccuccagcuu

SEQ ID NO: 4506 - RNA, 21 nt, RNAi-antisense strand
gcuggaggaaacagcgguuuu

SEQ ID NO: 4507 - DNA, 21 bp, Homo sapiens
gaaattcggtgtgtcataacc

SEQ ID NO: 4508 - RNA, 21 nt, RNAi-sense strand
aauucggugugucauaaccuu

SEQ ID NO: 4509 - RNA, 21 nt, RNAi-antisense strand
gguuaugacacaccgaauuuu

SEQ ID NO: 4510 - DNA, 21 bp, Homo sapiens
gaaccttgagcatgtgtctga

SEQ ID NO: 4511 - RNA, 21 nt, RNAi-sense strand
accuugagcaugugucugauu

SEQ ID NO: 4512 - RNA, 21 nt, RNAi-antisense strand
ucagacacaugcucaagguuu

SEQ ID NO: 4513 - DNA, 21 bp, Homo sapiens
gagcctcagagaaggtccagt

SEQ ID NO: 4514 - RNA, 21 nt, RNAi-sense strand
gccucagagaagguccaguuu

SEQ ID NO: 4515 - RNA, 21 nt, RNAi-antisense strand
acuggaccuucucugaggcuu

SEQ ID NO: 4516 - DNA, 21 bp, Homo sapiens
gaaacttacattaggtccgac

SEQ ID NO: 4517 - RNA, 21 nt, RNAi-sense strand
aacuuacauuagguccgacuu

SEQ ID NO: 4518 - RNA, 21 nt, RNAi-antisense strand
gucggaccuaauguaaguuuu

SEQ ID NO: 4519 - DNA, 21 bp, Homo sapiens
gactcaggagatgaacagctc

SEQ ID NO: 4520 - RNA, 21 nt, RNAi-sense strand
cucaggagaugaacagcucuu

SEQ ID NO: 4521 - RNA, 21 nt, RNAi-antisense strand
gagcuguucaucuccugaguu

SEQ ID NO: 4522 - DNA, 21 bp, Homo sapiens
gagatacatggctatttcagg

SEQ ID NO: 4523 - RNA, 21 nt, RNAi-sense strand
gauacauggcuauuucagguu

SEQ ID NO: 4524 - RNA, 21 nt, RNAi-antisense strand
ccugaaauagccauguaucuu

SEQ ID NO: 4525 - DNA, 21 bp, Homo sapiens
gagcaggagtatttcagtagt

SEQ ID NO: 4526 - RNA, 21 nt, RNAi-sense strand
gcaggaguauuucaguaguuu

SEQ ID NO: 4527 - RNA, 21 nt, RNAi-antisense strand
acuacugaaauacuccugcuu

SEQ ID NO: 4528 - DNA, 21 bp, Homo sapiens
gagtatttcagtagtgaggaa

SEQ ID NO: 4529 - RNA, 21 nt, RNAi-sense strand
guauuucaguagugaggaauu

SEQ ID NO: 4530 - RNA, 21 nt, RNAi-antisense strand
uuccucacuacugaaauacuu

SEQ ID NO: 4531 - DNA, 21 bp, Homo sapiens
gaggaatgctacgaggatgac

SEQ ID NO: 4532 - RNA, 21 nt, RNAi-sense strand
ggaaugcuacgaggaugacuu

SEQ ID NO: 4533 - RNA, 21 nt, RNAi-antisense strand
gucauccucguagcauuccuu

SEQ ID NO: 4534 - DNA, 21 bp, Homo sapiens
gaatgctacgaggatgacagc

SEQ ID NO: 4535 - RNA, 21 nt, RNAi-sense strand
augcuacgaggaugacagcuu

SEQ ID NO: 4536 - RNA, 21 nt, RNAi-antisense strand
gcugucauccucguagcauuu

SEQ ID NO: 4537 - DNA, 21 bp, Homo sapiens
gaaacatcgactctgagaggc

SEQ ID NO: 4538 - RNA, 21 nt, RNAi-sense strand
aacaucgacucugagaggcuu

SEQ ID NO: 4539 - RNA, 21 nt, RNAi-antisense strand
gccucucagagucgauguuuu

SEQ ID NO: 4540 - DNA, 21 bp, Homo sapiens
gattcttggaggacgatgact

SEQ ID NO: 4541 - RNA, 21 nt, RNAi-sense strand
uucuuggaggacgaugacuuu

SEQ ID NO: 4542 - RNA, 21 nt, RNAi-antisense strand
agucaucguccuccaagaauu

SEQ ID NO: 4543 - DNA, 21 bp, Homo sapiens
gattcacggagatctccaagg

SEQ ID NO: 4544 - RNA, 21 nt, RNAi-sense strand
uucacggagaucuccaagguu

SEQ ID NO: 4545 - RNA, 21 nt, RNAi-antisense strand
ccuuggagaucuccgugaauu

SEQ ID NO: 4546 - DNA, 21 bp, Homo sapiens
gagatctccaaggagacgcct

SEQ ID NO: 4547 - RNA, 21 nt, RNAi-sense strand
gaucuccaaggagacgccuuu

SEQ ID NO: 4548 - RNA, 21 nt, RNAi-antisense strand
aggcgucuccuuggagaucuu

SEQ ID NO: 4549 - DNA, 21 bp, Homo sapiens
gatctccaaggagacgcctac

SEQ ID NO: 4550 - RNA, 21 nt, RNAi-sense strand
ucuccaaggagacgccuacuu

SEQ ID NO: 4551 - RNA, 21 nt, RNAi-antisense strand
guaggcgucuccuuggagauu

SEQ ID NO: 4552 - DNA, 21 bp, Homo sapiens
gagatcctccttcaactttga

SEQ ID NO: 4553 - RNA, 21 nt, RNAi-sense strand
gauccuccuucaacuuugauu

SEQ ID NO: 4554 - RNA, 21 nt, RNAi-antisense strand
ucaaaguugaaggaggaucuu

SEQ ID NO: 4555 - DNA, 21 bp, Homo sapiens
gatcctccttcaactttgagt

SEQ ID NO: 4556 - RNA, 21 nt, RNAi-sense strand
uccuccuucaacuuugaguuu

SEQ ID NO: 4557 - RNA, 21 nt, RNAi-antisense strand
acucaaaguugaaggaggauu

SEQ ID NO: 4558 - DNA, 21 bp, Homo sapiens
gaagtactcaccgagtcactc

SEQ ID NO: 4559 - RNA, 21 nt, RNAi-sense strand
aguacucaccgagucacucuu

SEQ ID NO: 4560 - RNA, 21 nt, RNAi-antisense strand
gagugacucggugaguacuuu

SEQ ID NO: 4561 - DNA, 21 bp, Homo sapiens
gactggacaccgtgctacacc

SEQ ID NO: 4562 - RNA, 21 nt, RNAi-sense strand
cuggacaccgugcuacaccuu

SEQ ID NO: 4563 - RNA, 21 nt, RNAi-antisense strand
gguguagcacgguguccaguu

SEQ ID NO: 4564 - DNA, 21 bp, Homo sapiens
gatccaagtggagcagtcaga

SEQ ID NO: 4565 - RNA, 21 nt, RNAi-sense strand
uccaaguggagcagucagauu

SEQ ID NO: 4566 - RNA, 21 nt, RNAi-antisense strand
ucugacugcuccacuuggauu

SEQ ID NO: 4567 - DNA, 21 bp, Homo sapiens
gacatctcctaccggactttc

SEQ ID NO: 4568 - RNA, 21 nt, RNAi-sense strand
caucuccuaccggacuuucuu

SEQ ID NO: 4569 - RNA, 21 nt, RNAi-antisense strand
gaaaguccgguaggagauguu

SEQ ID NO: 4570 - DNA, 21 bp, Homo sapiens
gactttcacaccagccagcct

SEQ ID NO: 4571 - RNA, 21 nt, RNAi-sense strand
cuuucacaccagccagccuuu

SEQ ID NO: 4572 - RNA, 21 nt, RNAi-antisense strand
aggcuggcuggugugaaaguu

SEQ ID NO: 4573 - DNA, 21 bp, Homo sapiens
gacaagcagaggagtgcggac

SEQ ID NO: 4574 - RNA, 21 nt, RNAi-sense strand
caagcagaggagugcggacuu

SEQ ID NO: 4575 - RNA, 21 nt, RNAi-antisense strand
guccgcacuccucugcuuguu

SEQ ID NO: 4576 - DNA, 21 bp, Homo sapiens
gaggagtgcggacagcttggt

SEQ ID NO: 4577 - RNA, 21 nt, RNAi-sense strand
ggagugcggacagcuugguuu

SEQ ID NO: 4578 - RNA, 21 nt, RNAi-antisense strand
accaagcuguccgcacuccuu

SEQ ID NO: 4579 - DNA, 21 bp, Homo sapiens
gagtgcggacagcttggtgga

SEQ ID NO: 4580 - RNA, 21 nt, RNAi-sense strand
gugcggacagcuugguggauu

SEQ ID NO: 4581 - RNA, 21 nt, RNAi-antisense strand
uccaccaagcuguccgcacuu

SEQ ID NO: 4582 - DNA, 21 bp, Homo sapiens
gacagcttggtggaggcagtc

SEQ ID NO: 4583 - RNA, 21 nt, RNAi-sense strand
cagcuugguggaggcagucuu

SEQ ID NO: 4584 - RNA, 21 nt, RNAi-antisense strand
gacugccuccaccaagcuguu

SEQ ID NO: 4585 - DNA, 21 bp, Homo sapiens
gaggcagtcctgatatccgaa

SEQ ID NO: 4586 - RNA, 21 nt, RNAi-sense strand
ggcaguccugauauccgaauu

SEQ ID NO: 4587 - RNA, 21 nt, RNAi-antisense strand
uucggauaucaggacugccuu

SEQ ID NO: 4588 - DNA, 21 bp, Homo sapiens
gaaatcgctgatgcctgtgac

SEQ ID NO: 4589 - RNA, 21 nt, RNAi-sense strand
aaucgcugaugccugugacuu

SEQ ID NO: 4590 - RNA, 21 nt, RNAi-antisense strand
gucacaggcaucagcgauuuu

SEQ ID NO: 4591 - DNA, 21 bp, Homo sapiens
gatgcctgtgacctcaccatc

SEQ ID NO: 4592 - RNA, 21 nt, RNAi-sense strand
ugccugugaccucaccaucuu

SEQ ID NO: 4593 - RNA, 21 nt, RNAi-antisense strand
gauggugaggucacaggcauu

SEQ ID NO: 4594 - DNA, 21 bp, Homo sapiens
gacctcaccatcgacgagatg

SEQ ID NO: 4595 - RNA, 21 nt, RNAi-sense strand
ccucaccaucgacgagauguu

SEQ ID NO: 4596 - RNA, 21 nt, RNAi-antisense strand
caucucgucgauggugagguu

SEQ ID NO: 4597 - DNA, 21 bp, Homo sapiens
gacgagatggagagtgcagcc

SEQ ID NO: 4598 - RNA, 21 nt, RNAi-sense strand
cgagauggagagugcagccuu

SEQ ID NO: 4599 - RNA, 21 nt, RNAi-antisense strand
ggcugcacucuccaucucguu

SEQ ID NO: 4600 - DNA, 21 bp, Homo sapiens
gagatggagagtgcagccagc

SEQ ID NO: 4601 - RNA, 21 nt, RNAi-sense strand
gauggagagugcagccagcuu

SEQ ID NO: 4602 - RNA, 21 nt, RNAi-antisense strand
gcuggcugcacucuccaucuu

SEQ ID NO: 4603 - DNA, 21 bp, Homo sapiens
gatggagagtgcagccagcac

SEQ ID NO: 4604 - RNA, 21 nt, RNAi-sense strand
uggagagugcagccagcacuu

SEQ ID NO: 4605 - RNA, 21 nt, RNAi-antisense strand
gugcuggcugcacucuccauu

SEQ ID NO: 4606 - DNA, 21 bp, Homo sapiens
gactatgagctacaggacttt

SEQ ID NO: 4607 - RNA, 21 nt, RNAi-sense strand
cuaugagcuacaggacuuuuu

SEQ ID NO: 4608 - RNA, 21 nt, RNAi-antisense strand
aaaguccuguagcucauaguu

SEQ ID NO: 4609 - DNA, 21 bp, Homo sapiens
gagctacaggactttggtcct

SEQ ID NO: 4610 - RNA, 21 nt, RNAi-sense strand
gcuacaggacuuugguccuuu

SEQ ID NO: 4611 - RNA, 21 nt, RNAi-antisense strand
aggaccaaaguccuguagcuu

SEQ ID NO: 4612 - DNA, 21 bp, Homo sapiens
gactttggtcctggctacagc

SEQ ID NO: 4613 - RNA, 21 nt, RNAi-sense strand
cuuugguccuggcuacagcuu

SEQ ID NO: 4614 - RNA, 21 nt, RNAi-antisense strand
gcuguagccaggaccaaaguu

SEQ ID NO: 4615 - DNA, 21 bp, Homo sapiens
gatgaggaggacctggcggat

SEQ ID NO: 4616 - RNA, 21 nt, RNAi-sense strand
ugaggaggaccuggcggauuu

SEQ ID NO: 4617 - RNA, 21 nt, RNAi-antisense strand
auccgccagguccuccucauu

SEQ ID NO: 4618 - DNA, 21 bp, Homo sapiens
gaggaggacctggcggatgaa

SEQ ID NO: 4619 - RNA, 21 nt, RNAi-sense strand
ggaggaccuggcggaugaauu

SEQ ID NO: 4620 - RNA, 21 nt, RNAi-antisense strand
uucauccgccagguccuccuu

SEQ ID NO: 4621 - DNA, 21 bp, Homo sapiens
gaggacctggcggatgaaatg

SEQ ID NO: 4622 - RNA, 21 nt, RNAi-sense strand
ggaccuggcggaugaaauguu

SEQ ID NO: 4623 - RNA, 21 nt, RNAi-antisense strand
cauuucauccgccagguccuu

SEQ ID NO: 4624 - DNA, 21 bp, Homo sapiens
gacctggcggatgaaatgata

SEQ ID NO: 4625 - RNA, 21 nt, RNAi-sense strand
ccuggcggaugaaaugauauu

SEQ ID NO: 4626 - RNA, 21 nt, RNAi-antisense strand
uaucauuucauccgccagguu

SEQ ID NO: 4627 - DNA, 21 bp, Homo sapiens
gatgaaatgatatgcatcacc

SEQ ID NO: 4628 - RNA, 21 nt, RNAi-sense strand
ugaaaugauaugcaucaccuu

SEQ ID NO: 4629 - RNA, 21 nt, RNAi-antisense strand
ggugaugcauaucauuucauu

SEQ ID NO: 4630 - DNA, 21 bp, Homo sapiens
gaaatgatatgcatcaccacc

SEQ ID NO: 4631 - RNA, 21 nt, RNAi-sense strand
aaugauaugcaucaccaccuu

SEQ ID NO: 4632 - RNA, 21 nt, RNAi-antisense strand
gguggugaugcauaucauuuu

SEQ ID NO: 4633 - DNA, 21 bp, Homo sapiens
gatatgcatcaccaccttgta

SEQ ID NO: 4634 - RNA, 21 nt, RNAi-sense strand
uaugcaucaccaccuuguauu

SEQ ID NO: 4635 - RNA, 21 nt, RNAi-antisense strand
uacaagguggugaugcauauu

SEQ ID NO: 4636 - DNA, 21 bp, Homo sapiens
gaaagtttaggcactagttgg

SEQ ID NO: 4637 - RNA, 21 nt, RNAi-sense strand
aaguuuaggcacuaguugguu

SEQ ID NO: 4638 - RNA, 21 nt, RNAi-antisense strand
ccaacuagugccuaaacuuuu

SEQ ID NO: 4639 - DNA, 21 bp, Homo sapiens
gagatgtcatgcctcaagaaa

SEQ ID NO: 4640 - RNA, 21 nt, RNAi-sense strand
gaugucaugccucaagaaauu

SEQ ID NO: 4641 - RNA, 21 nt, RNAi-antisense strand
uuucuugaggcaugacaucuu

SEQ ID NO: 4642 - DNA, 21 bp, Homo sapiens
gatgtcatgcctcaagaaagc

SEQ ID NO: 4643 - RNA, 21 nt, RNAi-sense strand
ugucaugccucaagaaagcuu

SEQ ID NO: 4644 - RNA, 21 nt, RNAi-antisense strand
gcuuucuugaggcaugacauu

SEQ ID NO: 4645 - DNA, 21 bp, Homo sapiens
gaaagccataaacctggtagg

SEQ ID NO: 4646 - RNA, 21 nt, RNAi-sense strand
aagccauaaaccugguagguu

SEQ ID NO: 4647 - RNA, 21 nt, RNAi-antisense strand
ccuaccagguuuauggcuuuu

SEQ ID NO: 4648 - DNA, 21 bp, Homo sapiens
gagcctggcagagtaccatgc

SEQ ID NO: 4649 - RNA, 21 nt, RNAi-sense strand
gccuggcagaguaccaugcuu

SEQ ID NO: 4650 - RNA, 21 nt, RNAi-antisense strand
gcaugguacucugccaggcuu

SEQ ID NO: 4651 - DNA, 21 bp, Homo sapiens
gaaagttaaaggtgatgacga

SEQ ID NO: 4652 - RNA, 21 nt, RNAi-sense strand
aaguuaaaggugaugacgauu

SEQ ID NO: 4653 - RNA, 21 nt, RNAi-antisense strand
ucgucaucaccuuuaacuuuu

SEQ ID NO: 4654 - DNA, 21 bp, Homo sapiens
gatgacgatcatcacacctcg

SEQ ID NO: 4655 - RNA, 21 nt, RNAi-sense strand
ugacgaucaucacaccucguu

SEQ ID NO: 4656 - RNA, 21 nt, RNAi-antisense strand
cgaggugugaugaucgucauu

SEQ ID NO: 4657 - DNA, 21 bp, Homo sapiens
gacgatcatcacacctcgtgt

SEQ ID NO: 4658 - RNA, 21 nt, RNAi-sense strand
cgaucaucacaccucguguuu

SEQ ID NO: 4659 - RNA, 21 nt, RNAi-antisense strand
acacgaggugugaugaucguu

SEQ ID NO: 4660 - DNA, 21 bp, Homo sapiens
gatcatcacacctcgtgtcgt

SEQ ID NO: 4661 - RNA, 21 nt, RNAi-sense strand
ucaucacaccucgugucguuu

SEQ ID NO: 4662 - RNA, 21 nt, RNAi-antisense strand
acgacacgaggugugaugauu

SEQ ID NO: 4663 - DNA, 21 bp, Homo sapiens
tagtcgctcaataaatgttcg

SEQ ID NO: 4664 - RNA, 21 nt, RNAi-sense strand
gucgcucaauaaauguucguu

SEQ ID NO: 4665 - RNA, 21 nt, RNAi-antisense strand
cgaacauuuauugagcgacuu

SEQ ID NO: 4666 - DNA, 21 bp, Homo sapiens
taaatgttcgtggatgatgat

SEQ ID NO: 4667 - RNA, 21 nt, RNAi-sense strand
aauguucguggaugaugauuu

SEQ ID NO: 4668 - RNA, 21 nt, RNAi-antisense strand
aucaucauccacgaacauuuu

SEQ ID NO: 4669 - DNA, 21 bp, Homo sapiens
tatgcaagaggcaccagactt

SEQ ID NO: 4670 - RNA, 21 nt, RNAi-sense strand
ugcaagaggcaccagacuuuu

SEQ ID NO: 4671 - RNA, 21 nt, RNAi-antisense strand
aagucuggugccucuugcauu

SEQ ID NO: 4672 - DNA, 21 bp, Homo sapiens
tagctccaagcaaactgtcct

SEQ ID NO: 4673 - RNA, 21 nt, RNAi-sense strand
gcuccaagcaaacuguccuuu

SEQ ID NO: 4674 - RNA, 21 nt, RNAi-antisense strand
aggacaguuugcuuggagcuu

SEQ ID NO: 4675 - DNA, 21 bp, Homo sapiens
taactcgtccaacagccgacc

SEQ ID NO: 4676 - RNA, 21 nt, RNAi-sense strand
acucguccaacagccgaccuu

SEQ ID NO: 4677 - RNA, 21 nt, RNAi-antisense strand
ggucggcuguuggacgaguuu

SEQ ID NO: 4678 - DNA, 21 bp, Homo sapiens
tagtatagtggaatggaaacc

SEQ ID NO: 4679 - RNA, 21 nt, RNAi-sense strand
guauaguggaauggaaaccuu

SEQ ID NO: 4680 - RNA, 21 nt, RNAi-antisense strand
gguuuccauuccacuauacuu

SEQ ID NO: 4681 - DNA, 21 bp, Homo sapiens
tatagtggaatggaaaccatt

SEQ ID NO: 4682 - RNA, 21 nt, RNAi-sense strand
uaguggaauggaaaccauuuu

SEQ ID NO: 4683 - RNA, 21 nt, RNAi-antisense strand
aaugguuuccauuccacuauu

SEQ ID NO: 4684 - DNA, 21 bp, Homo sapiens
tagtggaatggaaaccatttg

SEQ ID NO: 4685 - RNA, 21 nt, RNAi-sense strand
guggaauggaaaccauuuguu

SEQ ID NO: 4686 - RNA, 21 nt, RNAi-antisense strand
caaaugguuuccauuccacuu

SEQ ID NO: 4687 - DNA, 21 bp, Homo sapiens
tagaatatgccttcctgatta

SEQ ID NO: 4688 - RNA, 21 nt, RNAi-sense strand
gaauaugccuuccugauuauu

SEQ ID NO: 4689 - RNA, 21 nt, RNAi-antisense strand
uaaucaggaaggcauauucuu

SEQ ID NO: 4690 - DNA, 21 bp, Homo sapiens
tatagcgtatggattattgct

SEQ ID NO: 4691 - RNA, 21 nt, RNAi-sense strand
uagcguauggauuauugcuuu

SEQ ID NO: 4692 - RNA, 21 nt, RNAi-antisense strand
agcaauaauccauacgcuauu

SEQ ID NO: 4693 - DNA, 21 bp, Homo sapiens
tagcgtatggattattgctac

SEQ ID NO: 4694 - RNA, 21 nt, RNAi-sense strand
gcguauggauuauugcuacuu

SEQ ID NO: 4695 - RNA, 21 nt, RNAi-antisense strand
guagcaauaauccauacgcuu

SEQ ID NO: 4696 - DNA, 21 bp, Homo sapiens
tatggattattgctacatcct

SEQ ID NO: 4697 - RNA, 21 nt, RNAi-sense strand
uggauuauugcuacauccuuu

SEQ ID NO: 4698 - RNA, 21 nt, RNAi-antisense strand
aggauguagcaauaauccauu

SEQ ID NO: 4699 - DNA, 21 bp, Homo sapiens
tattgctacatcctaatgctt

SEQ ID NO: 4700 - RNA, 21 nt, RNAi-sense strand
uugcuacauccuaaugcuuuu

SEQ ID NO: 4701 - RNA, 21 nt, RNAi-antisense strand
aagcauuaggauguagcaauu

SEQ ID NO: 4702 - DNA, 21 bp, Homo sapiens
taatgcttatgttaggaatgg

SEQ ID NO: 4703 - RNA, 21 nt, RNAi-sense strand
augcuuauguuaggaaugguu

SEQ ID NO: 4704 - RNA, 21 nt, RNAi-antisense strand
ccauuccuaacauaagcauuu

SEQ ID NO: 4705 - DNA, 21 bp, Homo sapiens
tatgttaggaatggatggaat

SEQ ID NO: 4706 - RNA, 21 nt, RNAi-sense strand
uguuaggaauggauggaauuu

SEQ ID NO: 4707 - RNA, 21 nt, RNAi-antisense strand
auuccauccauuccuaacauu

SEQ ID NO: 4708 - DNA, 21 bp, Homo sapiens
taggaatggatggaatttact

SEQ ID NO: 4709 - RNA, 21 nt, RNAi-sense strand
ggaauggauggaauuuacuuu

SEQ ID NO: 4710 - RNA, 21 nt, RNAi-antisense strand
aguaaauuccauccauuccuu

SEQ ID NO: 4711 - DNA, 21 bp, Homo sapiens
taaccaaagaaacagaaggcg

SEQ ID NO: 4712 - RNA, 21 nt, RNAi-sense strand
accaaagaaacagaaggcguu

SEQ ID NO: 4713 - RNA, 21 nt, RNAi-antisense strand
cgccuucuguuucuuugguuu

SEQ ID NO: 4714 - DNA, 21 bp, Homo sapiens
tacaagttgtcctgaactcca

SEQ ID NO: 4715 - RNA, 21 nt, RNAi-sense strand
caaguuguccugaacuccauu

SEQ ID NO: 4716 - RNA, 21 nt, RNAi-antisense strand
uggaguucaggacaacuuguu

SEQ ID NO: 4717 - DNA, 21 bp, Homo sapiens
tactgccaatggcacggaatg

SEQ ID NO: 4718 - RNA, 21 nt, RNAi-sense strand
cugccaauggcacggaauguu

SEQ ID NO: 4719 - RNA, 21 nt, RNAi-antisense strand
cauuccgugccauuggcaguu

SEQ ID NO: 4720 - DNA, 21 bp, Homo sapiens
taactttgcctttgccatgct

SEQ ID NO: 4721 - RNA, 21 nt, RNAi-sense strand
acuuugccuuugccaugcuuu

SEQ ID NO: 4722 - RNA, 21 nt, RNAi-antisense strand
agcauggcaaaggcaaaguuu

SEQ ID NO: 4723 - DNA, 21 bp, Homo sapiens
tactgtgtttcagtgcatcac

SEQ ID NO: 4724 - RNA, 21 nt, RNAi-sense strand
cuguguuucagugcaucacuu

SEQ ID NO: 4725 - RNA, 21 nt, RNAi-antisense strand
gugaugcacugaaacacaguu

SEQ ID NO: 4726 - DNA, 21 bp, Homo sapiens
tagtctgatcatccttggctc

SEQ ID NO: 4727 - RNA, 21 nt, RNAi-sense strand
gucugaucauccuuggcucuu

SEQ ID NO: 4728 - RNA, 21 nt, RNAi-antisense strand
gagccaaggaugaucagacuu

SEQ ID NO: 4729 - DNA, 21 bp, Homo sapiens
taacctggttcttggtgtcct

SEQ ID NO: 4730 - RNA, 21 nt, RNAi-sense strand
accugguucuugguguccuuu

SEQ ID NO: 4731 - RNA, 21 nt, RNAi-antisense strand
aggacaccaagaaccagguuu

SEQ ID NO: 4732 - DNA, 21 bp, Homo sapiens
tagtggagaattctcaaagga

SEQ ID NO: 4733 - RNA, 21 nt, RNAi-sense strand
guggagaauucucaaaggauu

SEQ ID NO: 4734 - RNA, 21 nt, RNAi-antisense strand
uccuuugagaauucuccacuu

SEQ ID NO: 4735 - DNA, 21 bp, Homo sapiens
tactggctggttatcgtcctg

SEQ ID NO: 4736 - RNA, 21 nt, RNAi-sense strand
cuggcugguuaucguccuguu

SEQ ID NO: 4737 - RNA, 21 nt, RNAi-antisense strand
caggacgauaaccagccaguu

SEQ ID NO: 4738 - DNA, 21 bp, Homo sapiens
tatcgtcctggtgtttctgaa

SEQ ID NO: 4739 - RNA, 21 nt, RNAi-sense strand
ucguccugguguuucugaauu

SEQ ID NO: 4740 - RNA, 21 nt, RNAi-antisense strand
uucagaaacaccaggacgauu

SEQ ID NO: 4741 - DNA, 21 bp, Homo sapiens
taaccatttcctctgagcact

SEQ ID NO: 4742 - RNA, 21 nt, RNAi-sense strand
accauuuccucugagcacuuu

SEQ ID NO: 4743 - RNA, 21 nt, RNAi-antisense strand
agugcucagaggaaaugguuu

SEQ ID NO: 4744 - DNA, 21 bp, Homo sapiens
tacaatcagccagattggttg

SEQ ID NO: 4745 - RNA, 21 nt, RNAi-sense strand
caaucagccagauugguuguu

SEQ ID NO: 4746 - RNA, 21 nt, RNAi-antisense strand
caaccaaucuggcugauuguu

SEQ ID NO: 4747 - DNA, 21 bp, Homo sapiens
tattgccaacaaagtcctctt

SEQ ID NO: 4748 - RNA, 21 nt, RNAi-sense strand
uugccaacaaaguccucuuuu

SEQ ID NO: 4749 - RNA, 21 nt, RNAi-antisense strand
aagaggacuuuguuggcaauu

SEQ ID NO: 4750 - DNA, 21 bp, Homo sapiens
taagaatcttcaaagtgacca

SEQ ID NO: 4751 - RNA, 21 nt, RNAi-sense strand
agaaucuucaaagugaccauu

SEQ ID NO: 4752 - RNA, 21 nt, RNAi-antisense strand
uggucacuuugaagauucuuu

SEQ ID NO: 4753 - DNA, 21 bp, Homo sapiens
tagtggcatccttattaaact

SEQ ID NO: 4754 - RNA, 21 nt, RNAi-sense strand
guggcauccuuauuaaacuuu

SEQ ID NO: 4755 - RNA, 21 nt, RNAi-antisense strand
aguuuaauaaggaugccacuu

SEQ ID NO: 4756 - DNA, 21 bp, Homo sapiens
tattaaactccatgaagtcca

SEQ ID NO: 4757 - RNA, 21 nt, RNAi-sense strand
uuaaacuccaugaaguccauu

SEQ ID NO: 4758 - RNA, 21 nt, RNAi-antisense strand
uggacuucauggaguuuaauu

SEQ ID NO: 4759 - DNA, 21 bp, Homo sapiens
taaactccatgaagtccatcg

SEQ ID NO: 4760 - RNA, 21 nt, RNAi-sense strand
aacuccaugaaguccaucguu

SEQ ID NO: 4761 - RNA, 21 nt, RNAi-antisense strand
cgauggacuucauggaguuuu

SEQ ID NO: 4762 - DNA, 21 bp, Homo sapiens
tacgatggcatcatggcttac

SEQ ID NO: 4763 - RNA, 21 nt, RNAi-sense strand
cgauggcaucauggcuuacuu

SEQ ID NO: 4764 - RNA, 21 nt, RNAi-antisense strand
guaagccaugaugccaucguu

SEQ ID NO: 4765 - DNA, 21 bp, Homo sapiens
tacttcatcatcctcttcatt

SEQ ID NO: 4766 - RNA, 21 nt, RNAi-sense strand
cuucaucauccucuucauuuu

SEQ ID NO: 4767 - RNA, 21 nt, RNAi-antisense strand
aaugaagaggaugaugaaguu

SEQ ID NO: 4768 - DNA, 21 bp, Homo sapiens
tactgaatgtcttcttggcca

SEQ ID NO: 4769 - RNA, 21 nt, RNAi-sense strand
cugaaugucuucuuggccauu

SEQ ID NO: 4770 - RNA, 21 nt, RNAi-antisense strand
uggccaagaagacauucaguu

SEQ ID NO: 4771 - DNA, 21 bp, Homo sapiens
tagacaatttggctgatgctg

SEQ ID NO: 4772 - RNA, 21 nt, RNAi-sense strand
gacaauuuggcugaugcuguu

SEQ ID NO: 4773 - RNA, 21 nt, RNAi-antisense strand
cagcaucagccaaauugucuu

SEQ ID NO: 4774 - DNA, 21 bp, Homo sapiens
tagccaacagtgacaacaagg

SEQ ID NO: 4775 - RNA, 21 nt, RNAi-sense strand
gccaacagugacaacaagguu

SEQ ID NO: 4776 - RNA, 21 nt, RNAi-antisense strand
ccuuguugucacuguuggcuu

SEQ ID NO: 4777 - DNA, 21 bp, Homo sapiens
tatagagaagaggatgaagac

SEQ ID NO: 4778 - RNA, 21 nt, RNAi-sense strand
uagagaagaggaugaagacuu

SEQ ID NO: 4779 - RNA, 21 nt, RNAi-antisense strand
gucuucauccucuucucuauu

SEQ ID NO: 4780 - DNA, 21 bp, Homo sapiens
tagagaagaggatgaagacaa

SEQ ID NO: 4781 - RNA, 21 nt, RNAi-sense strand
gagaagaggaugaagacaauu

SEQ ID NO: 4782 - RNA, 21 nt, RNAi-antisense strand
uugucuucauccucuucucuu

SEQ ID NO: 4783 - DNA, 21 bp, Homo sapiens
tatccgccttgcgatgtgcca

SEQ ID NO: 4784 - RNA, 21 nt, RNAi-sense strand
uccgccuugcgaugugccauu

SEQ ID NO: 4785 - RNA, 21 nt, RNAi-antisense strand
uggcacaucgcaaggcggauu

SEQ ID NO: 4786 - DNA, 21 bp, Homo sapiens
taggctgccacaagctcatca

SEQ ID NO: 4787 - RNA, 21 nt, RNAi-sense strand
ggcugccacaagcucaucauu

SEQ ID NO: 4788 - RNA, 21 nt, RNAi-antisense strand
ugaugagcuuguggcagccuu

SEQ ID NO: 4789 - DNA, 21 bp, Homo sapiens
tactttgactatgccttcaca

SEQ ID NO: 4790 - RNA, 21 nt, RNAi-sense strand
cuuugacuaugccuucacauu

SEQ ID NO: 4791 - RNA, 21 nt, RNAi-antisense strand
ugugaaggcauagucaaaguu

SEQ ID NO: 4792 - DNA, 21 bp, Homo sapiens
tatgccttcacagccatcttt

SEQ ID NO: 4793 - RNA, 21 nt, RNAi-sense strand
ugccuucacagccaucuuuuu

SEQ ID NO: 4794 - RNA, 21 nt, RNAi-antisense strand
aaagauggcugugaaggcauu

SEQ ID NO: 4795 - DNA, 21 bp, Homo sapiens
tactgttgagatcctgttgaa

SEQ ID NO: 4796 - RNA, 21 nt, RNAi-sense strand
cuguugagauccuguugaauu

SEQ ID NO: 4797 - RNA, 21 nt, RNAi-antisense strand
uucaacaggaucucaacaguu

SEQ ID NO: 4798 - DNA, 21 bp, Homo sapiens
tacttcaatttgctggatatg

SEQ ID NO: 4799 - RNA, 21 nt, RNAi-sense strand
cuucaauuugcuggauauguu

SEQ ID NO: 4800 - RNA, 21 nt, RNAi-antisense strand
cauauccagcaaauugaaguu

SEQ ID NO: 4801 - DNA, 21 bp, Homo sapiens
taagcacgtggtccagtgcgt

SEQ ID NO: 4802 - RNA, 21 nt, RNAi-sense strand
agcacgugguccagugcguuu

SEQ ID NO: 4803 - RNA, 21 nt, RNAi-antisense strand
acgcacuggaccacgugcuuu

SEQ ID NO: 4804 - DNA, 21 bp, Homo sapiens
tatcgctgtacggatgaagcc

SEQ ID NO: 4805 - RNA, 21 nt, RNAi-sense strand
ucgcuguacggaugaagccuu

SEQ ID NO: 4806 - RNA, 21 nt, RNAi-antisense strand
ggcuucauccguacagcgauu

SEQ ID NO: 4807 - DNA, 21 bp, Homo sapiens
tatgatggcgctcttcacagt

SEQ ID NO: 4808 - RNA, 21 nt, RNAi-sense strand
ugauggcgcucuucacaguuu

SEQ ID NO: 4809 - RNA, 21 nt, RNAi-antisense strand
acugugaagagcgccaucauu

SEQ ID NO: 4810 - DNA, 21 bp, Homo sapiens
tataaagccatcgactcgaat

SEQ ID NO: 4811 - RNA, 21 nt, RNAi-sense strand
uaaagccaucgacucgaauuu

SEQ ID NO: 4812 - RNA, 21 nt, RNAi-antisense strand
auucgagucgauggcuuuauu

SEQ ID NO: 4813 - DNA, 21 bp, Homo sapiens
taaagccatcgactcgaatgg

SEQ ID NO: 4814 - RNA, 21 nt, RNAi-sense strand
aagccaucgacucgaaugguu

SEQ ID NO: 4815 - RNA, 21 nt, RNAi-antisense strand
ccauucgagucgauggcuuuu

SEQ ID NO: 4816 - DNA, 21 bp, Homo sapiens
tacaaccaccgcgtggagatc

SEQ ID NO: 4817 - RNA, 21 nt, RNAi-sense strand
caaccaccgcguggagaucuu

SEQ ID NO: 4818 - RNA, 21 nt, RNAi-antisense strand
gaucuccacgcggugguuguu

SEQ ID NO: 4819 - DNA, 21 bp, Homo sapiens
tacatcatcattgtagctttc

SEQ ID NO: 4820 - RNA, 21 nt, RNAi-sense strand
caucaucauuguagcuuucuu

SEQ ID NO: 4821 - RNA, 21 nt, RNAi-antisense strand
gaaagcuacaaugaugauguu

SEQ ID NO: 4822 - DNA, 21 bp, Homo sapiens
tagctttcttcatgatgaaca

SEQ ID NO: 4823 - RNA, 21 nt, RNAi-sense strand
gcuuucuucaugaugaacauu

SEQ ID NO: 4824 - RNA, 21 nt, RNAi-antisense strand
uguucaucaugaagaaagcuu

SEQ ID NO: 4825 - DNA, 21 bp, Homo sapiens
tacatttcaggaacaaggaga

SEQ ID NO: 4826 - RNA, 21 nt, RNAi-sense strand
cauuucaggaacaaggagauu

SEQ ID NO: 4827 - RNA, 21 nt, RNAi-antisense strand
ucuccuuguuccugaaauguu

SEQ ID NO: 4828 - DNA, 21 bp, Homo sapiens
tataagaactgtgagctggac

SEQ ID NO: 4829 - RNA, 21 nt, RNAi-sense strand
uaagaacugugagcuggacuu

SEQ ID NO: 4830 - RNA, 21 nt, RNAi-antisense strand
guccagcucacaguucuuauu

SEQ ID NO: 4831 - DNA, 21 bp, Homo sapiens
taagaactgtgagctggacaa

SEQ ID NO: 4832 - RNA, 21 nt, RNAi-sense strand
agaacugugagcuggacaauu

SEQ ID NO: 4833 - RNA, 21 nt, RNAi-antisense strand
uuguccagcucacaguucuuu

SEQ ID NO: 4834 - DNA, 21 bp, Homo sapiens
taccagtacaagttctggtac

SEQ ID NO: 4835 - RNA, 21 nt, RNAi-sense strand
ccaguacaaguucugguacuu

SEQ ID NO: 4836 - RNA, 21 nt, RNAi-antisense strand
guaccagaacuuguacugguu

SEQ ID NO: 4837 - DNA, 21 bp, Homo sapiens
tacaagttctggtacgtggtg

SEQ ID NO: 4838 - RNA, 21 nt, RNAi-sense strand
caaguucugguacgugguguu

SEQ ID NO: 4839 - RNA, 21 nt, RNAi-antisense strand
caccacguaccagaacuuguu

SEQ ID NO: 4840 - DNA, 21 bp, Homo sapiens
tacgtggtgaactcttcgcct

SEQ ID NO: 4841 - RNA, 21 nt, RNAi-sense strand
cguggugaacucuucgccuuu

SEQ ID NO: 4842 - RNA, 21 nt, RNAi-antisense strand
aggcgaagaguucaccacguu

SEQ ID NO: 4843 - DNA, 21 bp, Homo sapiens
tacatgatgtttgtcctcatc

SEQ ID NO: 4844 - RNA, 21 nt, RNAi-sense strand
caugauguuuguccucaucuu

SEQ ID NO: 4845 - RNA, 21 nt, RNAi-antisense strand
gaugaggacaaacaucauguu

SEQ ID NO: 4846 - DNA, 21 bp, Homo sapiens
tacgagcagtccaagatgttc

SEQ ID NO: 4847 - RNA, 21 nt, RNAi-sense strand
cgagcaguccaagauguucuu

SEQ ID NO: 4848 - RNA, 21 nt, RNAi-antisense strand
gaacaucuuggacugcucguu

SEQ ID NO: 4849 - DNA, 21 bp, Homo sapiens
tagtgacgcctggaacacgtt

SEQ ID NO: 4850 - RNA, 21 nt, RNAi-sense strand
gugacgccuggaacacguuuu

SEQ ID NO: 4851 - RNA, 21 nt, RNAi-antisense strand
aacguguuccaggcgucacuu

SEQ ID NO: 4852 - DNA, 21 bp, Homo sapiens
taatcggcagcattatagacg

SEQ ID NO: 4853 - RNA, 21 nt, RNAi-sense strand
aucggcagcauuauagacguu

SEQ ID NO: 4854 - RNA, 21 nt, RNAi-antisense strand
cgucuauaaugcugccgauuu

SEQ ID NO: 4855 - DNA, 21 bp, Homo sapiens
tattaagtcctttcaggcgct

SEQ ID NO: 4856 - RNA, 21 nt, RNAi-sense strand
uuaaguccuuucaggcgcuuu

SEQ ID NO: 4857 - RNA, 21 nt, RNAi-antisense strand
agcgccugaaaggacuuaauu

SEQ ID NO: 4858 - DNA, 21 bp, Homo sapiens
tagccatgctgttcttcatct

SEQ ID NO: 4859 - RNA, 21 nt, RNAi-sense strand
gccaugcuguucuucaucuuu

SEQ ID NO: 4860 - RNA, 21 nt, RNAi-antisense strand
agaugaagaacagcauggcuu

SEQ ID NO: 4861 - DNA, 21 bp, Homo sapiens
tatgcggtcattggcatgcag

SEQ ID NO: 4862 - RNA, 21 nt, RNAi-sense strand
ugcggucauuggcaugcaguu

SEQ ID NO: 4863 - RNA, 21 nt, RNAi-antisense strand
cugcaugccaaugaccgcauu

SEQ ID NO: 4864 - DNA, 21 bp, Homo sapiens
taacaaccagatcaataggaa

SEQ ID NO: 4865 - RNA, 21 nt, RNAi-sense strand
acaaccagaucaauaggaauu

SEQ ID NO: 4866 - RNA, 21 nt, RNAi-antisense strand
uuccuauugaucugguuguuu

SEQ ID NO: 4867 - DNA, 21 bp, Homo sapiens
taggaacaataacttccagac

SEQ ID NO: 4868 - RNA, 21 nt, RNAi-sense strand
ggaacaauaacuuccagacuu

SEQ ID NO: 4869 - RNA, 21 nt, RNAi-antisense strand
gucuggaaguuauuguuccuu

SEQ ID NO: 4870 - DNA, 21 bp, Homo sapiens
tacatgctctgtgcatttctg

SEQ ID NO: 4871 - RNA, 21 nt, RNAi-sense strand
caugcucugugcauuucuguu

SEQ ID NO: 4872 - RNA, 21 nt, RNAi-antisense strand
cagaaaugcacagagcauguu

SEQ ID NO: 4873 - DNA, 21 bp, Homo sapiens
tagcgtgcaagagattagttg

SEQ ID NO: 4874 - RNA, 21 nt, RNAi-sense strand
gcgugcaagagauuaguuguu

SEQ ID NO: 4875 - RNA, 21 nt, RNAi-antisense strand
caacuaaucucuugcacgcuu

SEQ ID NO: 4876 - DNA, 21 bp, Homo sapiens
tagttgccatgaacatgcctc

SEQ ID NO: 4877 - RNA, 21 nt, RNAi-sense strand
guugccaugaacaugccucuu

SEQ ID NO: 4878 - RNA, 21 nt, RNAi-antisense strand
gaggcauguucauggcaacuu

SEQ ID NO: 4879 - DNA, 21 bp, Homo sapiens
tatgccactttcctgatacag

SEQ ID NO: 4880 - RNA, 21 nt, RNAi-sense strand
ugccacuuuccugauacaguu

SEQ ID NO: 4881 - RNA, 21 nt, RNAi-antisense strand
cuguaucaggaaaguggcauu

SEQ ID NO: 4882 - DNA, 21 bp, Homo sapiens
tacaggactactttaggaaat

SEQ ID NO: 4883 - RNA, 21 nt, RNAi-sense strand
caggacuacuuuaggaaauuu

SEQ ID NO: 4884 - RNA, 21 nt, RNAi-antisense strand
auuuccuaaaguaguccuguu

SEQ ID NO: 4885 - DNA, 21 bp, Homo sapiens
taggaaattcaagaaacggaa

SEQ ID NO: 4886 - RNA, 21 nt, RNAi-sense strand
ggaaauucaagaaacggaauu

SEQ ID NO: 4887 - RNA, 21 nt, RNAi-antisense strand
uuccguuucuugaauuuccuu

SEQ ID NO: 4888 - DNA, 21 bp, Homo sapiens
taaggacactgcatgacattg

SEQ ID NO: 4889 - RNA, 21 nt, RNAi-sense strand
aggacacugcaugacauuguu

SEQ ID NO: 4890 - RNA, 21 nt, RNAi-antisense strand
caaugucaugcaguguccuuu

SEQ ID NO: 4891 - DNA, 21 bp, Homo sapiens
tatatcgtgtgatttgcaaga

SEQ ID NO: 4892 - RNA, 21 nt, RNAi-sense strand
uaucgugugauuugcaagauu

SEQ ID NO: 4893 - RNA, 21 nt, RNAi-antisense strand
ucuugcaaaucacacgauauu

SEQ ID NO: 4894 - DNA, 21 bp, Homo sapiens
tatcgtgtgatttgcaagatg

SEQ ID NO: 4895 - RNA, 21 nt, RNAi-sense strand
ucgugugauuugcaagauguu

SEQ ID NO: 4896 - RNA, 21 nt, RNAi-antisense strand
caucuugcaaaucacacgauu

SEQ ID NO: 4897 - DNA, 21 bp, Homo sapiens
taatagtgataggagagattc

SEQ ID NO: 4898 - RNA, 21 nt, RNAi-sense strand
auagugauaggagagauucuu

SEQ ID NO: 4899 - RNA, 21 nt, RNAi-antisense strand
gaaucucuccuaucacuauuu

SEQ ID NO: 4900 - DNA, 21 bp, Homo sapiens
tactgagaaaccgctgtttcc

SEQ ID NO: 4901 - RNA, 21 nt, RNAi-sense strand
cugagaaaccgcuguuuccuu

SEQ ID NO: 4902 - RNA, 21 nt, RNAi-antisense strand
ggaaacagcgguuucucaguu

SEQ ID NO: 4903 - DNA, 21 bp, Homo sapiens
taattccataggaaagcaagt

SEQ ID NO: 4904 - RNA, 21 nt, RNAi-sense strand
auuccauaggaaagcaaguuu

SEQ ID NO: 4905 - RNA, 21 nt, RNAi-antisense strand
acuugcuuuccuauggaauuu

SEQ ID NO: 4906 - DNA, 21 bp, Homo sapiens
taatgccaatatgtccaaagc

SEQ ID NO: 4907 - RNA, 21 nt, RNAi-sense strand
augccaauauguccaaagcuu

SEQ ID NO: 4908 - RNA, 21 nt, RNAi-antisense strand
gcuuuggacauauuggcauuu

SEQ ID NO: 4909 - DNA, 21 bp, Homo sapiens
tatgaaacttacattaggtcc

SEQ ID NO: 4910 - RNA, 21 nt, RNAi-sense strand
ugaaacuuacauuagguccuu

SEQ ID NO: 4911 - RNA, 21 nt, RNAi-antisense strand
ggaccuaauguaaguuucauu

SEQ ID NO: 4912 - DNA, 21 bp, Homo sapiens
tacattaggtccgactcagga

SEQ ID NO: 4913 - RNA, 21 nt, RNAi-sense strand
cauuagguccgacucaggauu

SEQ ID NO: 4914 - RNA, 21 nt, RNAi-antisense strand
uccugagucggaccuaauguu

SEQ ID NO: 4915 - DNA, 21 bp, Homo sapiens
taggtccgactcaggagatga

SEQ ID NO: 4916 - RNA, 21 nt, RNAi-sense strand
gguccgacucaggagaugauu

SEQ ID NO: 4917 - RNA, 21 nt, RNAi-antisense strand
ucaucuccugagucggaccuu

SEQ ID NO: 4918 - DNA, 21 bp, Homo sapiens
tatttcagtagtgaggaatgc

SEQ ID NO: 4919 - RNA, 21 nt, RNAi-sense strand
uuucaguagugaggaaugcuu

SEQ ID NO: 4920 - RNA, 21 nt, RNAi-antisense strand
gcauuccucacuacugaaauu

SEQ ID NO: 4921 - DNA, 21 bp, Homo sapiens
tagtgaggaatgctacgagga

SEQ ID NO: 4922 - RNA, 21 nt, RNAi-sense strand
gugaggaaugcuacgaggauu

SEQ ID NO: 4923 - RNA, 21 nt, RNAi-antisense strand
uccucguagcauuccucacuu

SEQ ID NO: 4924 - DNA, 21 bp, Homo sapiens
tatggctactacagcagatac

SEQ ID NO: 4925 - RNA, 21 nt, RNAi-sense strand
uggcuacuacagcagauacuu

SEQ ID NO: 4926 - RNA, 21 nt, RNAi-antisense strand
guaucugcuguaguagccauu

SEQ ID NO: 4927 - DNA, 21 bp, Homo sapiens
tatgattcacggagatctcca

SEQ ID NO: 4928 - RNA, 21 nt, RNAi-sense strand
ugauucacggagaucuccauu

SEQ ID NO: 4929 - RNA, 21 nt, RNAi-antisense strand
uggagaucuccgugaaucauu

SEQ ID NO: 4930 - DNA, 21 bp, Homo sapiens
taatgcagcaacagatcatgg

SEQ ID NO: 4931 - RNA, 21 nt, RNAi-sense strand
augcagcaacagaucaugguu

SEQ ID NO: 4932 - RNA, 21 nt, RNAi-antisense strand
ccaugaucuguugcugcauuu

SEQ ID NO: 4933 - DNA, 21 bp, Homo sapiens
tactcaccgagtcactcgacc

SEQ ID NO: 4934 - RNA, 21 nt, RNAi-sense strand
cucaccgagucacucgaccuu

SEQ ID NO: 4935 - RNA, 21 nt, RNAi-antisense strand
ggucgagugacucggugaguu

SEQ ID NO: 4936 - DNA, 21 bp, Homo sapiens
taccggactttcacaccagcc

SEQ ID NO: 4937 - RNA, 21 nt, RNAi-sense strand
ccggacuuucacaccagccuu

SEQ ID NO: 4938 - RNA, 21 nt, RNAi-antisense strand
ggcuggugugaaaguccgguu

SEQ ID NO: 4939 - DNA, 21 bp, Homo sapiens
tatgagctacaggactttggt

SEQ ID NO: 4940 - RNA, 21 nt, RNAi-sense strand
ugagcuacaggacuuugguuu

SEQ ID NO: 4941 - RNA, 21 nt, RNAi-antisense strand
accaaaguccuguagcucauu

SEQ ID NO: 4942 - DNA, 21 bp, Homo sapiens
tacaggactttggtcctggct

SEQ ID NO: 4943 - RNA, 21 nt, RNAi-sense strand
caggacuuugguccuggcuuu

SEQ ID NO: 4944 - RNA, 21 nt, RNAi-antisense strand
agccaggaccaaaguccuguu

SEQ ID NO: 4945 - DNA, 21 bp, Homo sapiens
tacagcgacgaagagccagac

SEQ ID NO: 4946 - RNA, 21 nt, RNAi-sense strand
cagcgacgaagagccagacuu

SEQ ID NO: 4947 - RNA, 21 nt, RNAi-antisense strand
gucuggcucuucgucgcuguu

SEQ ID NO: 4948 - DNA, 21 bp, Homo sapiens
tatgcatcaccaccttgtagc

SEQ ID NO: 4949 - RNA, 21 nt, RNAi-sense strand
ugcaucaccaccuuguagcuu

SEQ ID NO: 4950 - RNA, 21 nt, RNAi-antisense strand
gcuacaagguggugaugcauu

SEQ ID NO: 4951 - DNA, 21 bp, Homo sapiens
tagttaggaaagtttaggcac

SEQ ID NO: 4952 - RNA, 21 nt, RNAi-sense strand
guuaggaaaguuuaggcacuu

SEQ ID NO: 4953 - RNA, 21 nt, RNAi-antisense strand
gugccuaaacuuuccuaacuu

SEQ ID NO: 4954 - DNA, 21 bp, Homo sapiens
taggaaagtttaggcactagt

SEQ ID NO: 4955 - RNA, 21 nt, RNAi-sense strand
ggaaaguuuaggcacuaguuu

SEQ ID NO: 4956 - RNA, 21 nt, RNAi-antisense strand
acuagugccuaaacuuuccuu

SEQ ID NO: 4957 - DNA, 21 bp, Homo sapiens
tataagagatgtcatgcctca

SEQ ID NO: 4958 - RNA, 21 nt, RNAi-sense strand
uaagagaugucaugccucauu

SEQ ID NO: 4959 - RNA, 21 nt, RNAi-antisense strand
ugaggcaugacaucucuuauu

SEQ ID NO: 4960 - DNA, 21 bp, Homo sapiens
taagagatgtcatgcctcaag

SEQ ID NO: 4961 - RNA, 21 nt, RNAi-sense strand
agagaugucaugccucaaguu

SEQ ID NO: 4962 - RNA, 21 nt, RNAi-antisense strand
cuugaggcaugacaucucuuu

SEQ ID NO: 4963 - DNA, 21 bp, Homo sapiens
taaacctggtaggaacaggtc

SEQ ID NO: 4964 - RNA, 21 nt, RNAi-sense strand
aaccugguaggaacaggucuu

SEQ ID NO: 4965 - RNA, 21 nt, RNAi-antisense strand
gaccuguuccuaccagguuuu

SEQ ID NO: 4966 - DNA, 21 bp, Homo sapiens
taaaggtgatgacgatcatca

SEQ ID NO: 4967 - RNA, 21 nt, RNAi-sense strand
aaggugaugacgaucaucauu

SEQ ID NO: 4968 - RNA, 21 nt, RNAi-antisense strand
ugaugaucgucaucaccuuuu

SEQ ID NO: 4969 - DNA, 21 bp, Homo sapiens
tacctcagccatcggtctagc

SEQ ID NO: 4970 - RNA, 21 nt, RNAi-sense strand
ccucagccaucggucuagcuu

SEQ ID NO: 4971 - RNA, 21 nt, RNAi-antisense strand
gcuagaccgauggcugagguu

SEQ ID NO: 4972 - DNA, 21 bp, Homo sapiens
tacactgcgtcctggttcctg

SEQ ID NO: 4973 - RNA, 21 nt, RNAi-sense strand
cacugcguccugguuccuguu

SEQ ID NO: 4974 - RNA, 21 nt, RNAi-antisense strand
caggaaccaggacgcaguguu

SEQ ID NO: 4975 - DNA, 21 bp, Homo sapiens
aagctgcaatcgatgctgcta

SEQ ID NO: 4976 - RNA, 21 nt, RNAi-sense strand
gcugcaaucgaugcugcuauu

SEQ ID NO: 4977 - RNA, 21 nt, RNAi-antisense strand
uagcagcaucgauugcagcuu

SEQ ID NO: 4978 - DNA, 21 bp, Homo sapiens
aaacgtcagcaatacgccaag

SEQ ID NO: 4979 - RNA, 21 nt, RNAi-sense strand
acgucagcaauacgccaaguu

SEQ ID NO: 4980 - RNA, 21 nt, RNAi-antisense strand
cuuggcguauugcugacguuu

SEQ ID NO: 4981 - DNA, 21 bp, Homo sapiens
aacgtcagcaatacgccaaga

SEQ ID NO: 4982 - RNA, 21 nt, RNAi-sense strand
cgucagcaauacgccaagauu

SEQ ID NO: 4983 - RNA, 21 nt, RNAi-antisense strand
ucuuggcguauugcugacguu

SEQ ID NO: 4984 - DNA, 21 bp, Homo sapiens
aagagcctgcattagtatagt

SEQ ID NO: 4985 - RNA, 21 nt, RNAi-sense strand
gagccugcauuaguauaguuu

SEQ ID NO: 4986 - RNA, 21 nt, RNAi-antisense strand
acuauacuaaugcaggcucuu

SEQ ID NO: 4987 - DNA, 21 bp, Homo sapiens
aatgcttatgttaggaatgga

SEQ ID NO: 4988 - RNA, 21 nt, RNAi-sense strand
ugcuuauguuaggaauggauu

SEQ ID NO: 4989 - RNA, 21 nt, RNAi-antisense strand
uccauuccuaacauaagcauu

SEQ ID NO: 4990 - DNA, 21 bp, Homo sapiens
aatggatggaatttactggat

SEQ ID NO: 4991 - RNA, 21 nt, RNAi-sense strand
uggauggaauuuacuggauuu

SEQ ID NO: 4992 - RNA, 21 nt, RNAi-antisense strand
auccaguaaauuccauccauu

SEQ ID NO: 4993 - DNA, 21 bp, Homo sapiens
aaccactcaagcggcaaatct

SEQ ID NO: 4994 - RNA, 21 nt, RNAi-sense strand
ccacucaagcggcaaaucuuu

SEQ ID NO: 4995 - RNA, 21 nt, RNAi-antisense strand
agauuugccgcuugagugguu

SEQ ID NO: 4996 - DNA, 21 bp, Homo sapiens
aatggcacggaatgtaggagt

SEQ ID NO: 4997 - RNA, 21 nt, RNAi-sense strand
uggcacggaauguaggaguuu

SEQ ID NO: 4998 - RNA, 21 nt, RNAi-antisense strand
acuccuacauuccgugccauu

SEQ ID NO: 4999 - DNA, 21 bp, Homo sapiens
aaggcaaacgaaatactagca

SEQ ID NO: 5000 - RNA, 21 nt, RNAi-sense strand
ggcaaacgaaauacuagcauu

SEQ ID NO: 5001 - RNA, 21 nt, RNAi-antisense strand
ugcuaguauuucguuugccuu

SEQ ID NO: 5002 - DNA, 21 bp, Homo sapiens
aatcagccagattggttgaca

SEQ ID NO: 5003 - RNA, 21 nt, RNAi-sense strand
ucagccagauugguugacauu

SEQ ID NO: 5004 - RNA, 21 nt, RNAi-antisense strand
ugucaaccaaucuggcugauu

SEQ ID NO: 5005 - DNA, 21 bp, Homo sapiens
aagcatatttcgtctctcttt

SEQ ID NO: 5006 - RNA, 21 nt, RNAi-sense strand
gcauauuucgucucucuuuuu

SEQ ID NO: 5007 - RNA, 21 nt, RNAi-antisense strand
aaagagagacgaaauaugcuu

SEQ ID NO: 5008 - DNA, 21 bp, Homo sapiens
aaccggtttgattgcttcgtg

SEQ ID NO: 5009 - RNA, 21 nt, RNAi-sense strand
ccgguuugauugcuucguguu

SEQ ID NO: 5010 - RNA, 21 nt, RNAi-antisense strand
cacgaagcaaucaaaccgguu

SEQ ID NO: 5011 - DNA, 21 bp, Homo sapiens
aacttagtggcatccttatta

SEQ ID NO: 5012 - RNA, 21 nt, RNAi-sense strand
cuuaguggcauccuuauuauu

SEQ ID NO: 5013 - RNA, 21 nt, RNAi-antisense strand
uaauaaggaugccacuaaguu

SEQ ID NO: 5014 - DNA, 21 bp, Homo sapiens
aagcggagcacctttgacaat

SEQ ID NO: 5015 - RNA, 21 nt, RNAi-sense strand
gcggagcaccuuugacaauuu

SEQ ID NO: 5016 - RNA, 21 nt, RNAi-antisense strand
auugucaaaggugcuccgcuu

SEQ ID NO: 5017 - DNA, 21 bp, Homo sapiens
aatgctgtgatgtacgatggc

SEQ ID NO: 5018 - RNA, 21 nt, RNAi-sense strand
ugcugugauguacgauggcuu

SEQ ID NO: 5019 - RNA, 21 nt, RNAi-antisense strand
gccaucguacaucacagcauu

SEQ ID NO: 5020 - DNA, 21 bp, Homo sapiens
aatgatcgtctgcatctactt

SEQ ID NO: 5021 - RNA, 21 nt, RNAi-sense strand
ugaucgucugcaucuacuuuu

SEQ ID NO: 5022 - RNA, 21 nt, RNAi-antisense strand
aaguagaugcagacgaucauu

SEQ ID NO: 5023 - DNA, 21 bp, Homo sapiens
aaccagaagtcaaccagatag

SEQ ID NO: 5024 - RNA, 21 nt, RNAi-sense strand
ccagaagucaaccagauaguu

SEQ ID NO: 5025 - RNA, 21 nt, RNAi-antisense strand
cuaucugguugacuucugguu

SEQ ID NO: 5026 - DNA, 21 bp, Homo sapiens
aagtcaaccagatagccaaca

SEQ ID NO: 5027 - RNA, 21 nt, RNAi-sense strand
gucaaccagauagccaacauu

SEQ ID NO: 5028 - RNA, 21 nt, RNAi-antisense strand
uguuggcuaucugguugacuu

SEQ ID NO: 5029 - DNA, 21 bp, Homo sapiens
aacagtgacaacaaggttaca

SEQ ID NO: 5030 - RNA, 21 nt, RNAi-sense strand
cagugacaacaagguuacauu

SEQ ID NO: 5031 - RNA, 21 nt, RNAi-antisense strand
uguaaccuuguugucacuguu

SEQ ID NO: 5032 - DNA, 21 bp, Homo sapiens
aactacttcaatttgctggat

SEQ ID NO: 5033 - RNA, 21 nt, RNAi-sense strand
cuacuucaauuugcuggauuu

SEQ ID NO: 5034 - RNA, 21 nt, RNAi-antisense strand
auccagcaaauugaaguaguu

SEQ ID NO: 5035 - DNA, 21 bp, Homo sapiens
aagttctatcgctgtacggat

SEQ ID NO: 5036 - RNA, 21 nt, RNAi-sense strand
guucuaucgcuguacggauuu

SEQ ID NO: 5037 - RNA, 21 nt, RNAi-antisense strand
auccguacagcgauagaacuu

SEQ ID NO: 5038 - DNA, 21 bp, Homo sapiens
aacttcgacaacgtcctctct

SEQ ID NO: 5039 - RNA, 21 nt, RNAi-sense strand
cuucgacaacguccucucuuu

SEQ ID NO: 5040 - RNA, 21 nt, RNAi-antisense strand
agagaggacguugucgaaguu

SEQ ID NO: 5041 - DNA, 21 bp, Homo sapiens
aaagccatcgactcgaatgga

SEQ ID NO: 5042 - RNA, 21 nt, RNAi-sense strand
agccaucgacucgaauggauu

SEQ ID NO: 5043 - RNA, 21 nt, RNAi-antisense strand
uccauucgagucgauggcuuu

SEQ ID NO: 5044 - DNA, 21 bp, Homo sapiens
aagttctggtacgtggtgaac

SEQ ID NO: 5045 - RNA, 21 nt, RNAi-sense strand
guucugguacguggugaacuu

SEQ ID NO: 5046 - RNA, 21 nt, RNAi-antisense strand
guucaccacguaccagaacuu

SEQ ID NO: 5047 - DNA, 21 bp, Homo sapiens
aactcttcgcctttcgaatac

SEQ ID NO: 5048 - RNA, 21 nt, RNAi-sense strand
cucuucgccuuucgaauacuu

SEQ ID NO: 5049 - RNA, 21 nt, RNAi-antisense strand
guauucgaaaggcgaagaguu

SEQ ID NO: 5050 - DNA, 21 bp, Homo sapiens
aatgatgccatggacattctg

SEQ ID NO: 5051 - RNA, 21 nt, RNAi-sense strand
ugaugccauggacauucuguu

SEQ ID NO: 5052 - RNA, 21 nt, RNAi-antisense strand
cagaauguccauggcaucauu

SEQ ID NO: 5053 - DNA, 21 bp, Homo sapiens
aagagagcaatagaatctcca

SEQ ID NO: 5054 - RNA, 21 nt, RNAi-sense strand
gagagcaauagaaucuccauu

SEQ ID NO: 5055 - RNA, 21 nt, RNAi-antisense strand
uggagauucuauugcucucuu

SEQ ID NO: 5056 - DNA, 21 bp, Homo sapiens
aaagttgccatgagagataac

SEQ ID NO: 5057 - RNA, 21 nt, RNAi-sense strand
aguugccaugagagauaacuu

SEQ ID NO: 5058 - RNA, 21 nt, RNAi-antisense strand
guuaucucucauggcaacuuu

SEQ ID NO: 5059 - DNA, 21 bp, Homo sapiens
aagttgccatgagagataaca

SEQ ID NO: 5060 - RNA, 21 nt, RNAi-sense strand
guugccaugagagauaacauu

SEQ ID NO: 5061 - RNA, 21 nt, RNAi-antisense strand
uguuaucucucauggcaacuu

SEQ ID NO: 5062 - DNA, 21 bp, Homo sapiens
aaccagatcaataggaacaat

SEQ ID NO: 5063 - RNA, 21 nt, RNAi-sense strand
ccagaucaauaggaacaauuu

SEQ ID NO: 5064 - RNA, 21 nt, RNAi-antisense strand
auuguuccuauugaucugguu

SEQ ID NO: 5065 - DNA, 21 bp, Homo sapiens
aagagattagttgccatgaac

SEQ ID NO: 5066 - RNA, 21 nt, RNAi-sense strand
gagauuaguugccaugaacuu

SEQ ID NO: 5067 - RNA, 21 nt, RNAi-antisense strand
guucauggcaacuaaucucuu

SEQ ID NO: 5068 - DNA, 21 bp, Homo sapiens
aacatgcctctcaacagtgac

SEQ ID NO: 5069 - RNA, 21 nt, RNAi-sense strand
caugccucucaacagugacuu

SEQ ID NO: 5070 - RNA, 21 nt, RNAi-antisense strand
gucacuguugagaggcauguu

SEQ ID NO: 5071 - DNA, 21 bp, Homo sapiens
aaaccagcatgaaattacttg

SEQ ID NO: 5072 - RNA, 21 nt, RNAi-sense strand
accagcaugaaauuacuuguu

SEQ ID NO: 5073 - RNA, 21 nt, RNAi-antisense strand
caaguaauuucaugcugguuu

SEQ ID NO: 5074 - DNA, 21 bp, Homo sapiens
aaccagcatgaaattacttga

SEQ ID NO: 5075 - RNA, 21 nt, RNAi-sense strand
ccagcaugaaauuacuugauu

SEQ ID NO: 5076 - RNA, 21 nt, RNAi-antisense strand
ucaaguaauuucaugcugguu

SEQ ID NO: 5077 - DNA, 21 bp, Homo sapiens
aagttctatgccactttcctg

SEQ ID NO: 5078 - RNA, 21 nt, RNAi-sense strand
guucuaugccacuuuccuguu

SEQ ID NO: 5079 - RNA, 21 nt, RNAi-antisense strand
caggaaaguggcauagaacuu

SEQ ID NO: 5080 - DNA, 21 bp, Homo sapiens
aaatccggcgtgctatatcgt

SEQ ID NO: 5081 - RNA, 21 nt, RNAi-sense strand
auccggcgugcuauaucguuu

SEQ ID NO: 5082 - RNA, 21 nt, RNAi-antisense strand
acgauauagcacgccggauuu

SEQ ID NO: 5083 - DNA, 21 bp, Homo sapiens
aagatgacgagcctgaggaaa

SEQ ID NO: 5084 - RNA, 21 nt, RNAi-sense strand
gaugacgagccugaggaaauu

SEQ ID NO: 5085 - RNA, 21 nt, RNAi-antisense strand
uuuccucaggcucgucaucuu

SEQ ID NO: 5086 - DNA, 21 bp, Homo sapiens
aaatgccaatctcaataatgc

SEQ ID NO: 5087 - RNA, 21 nt, RNAi-sense strand
augccaaucucaauaaugcuu

SEQ ID NO: 5088 - RNA, 21 nt, RNAi-antisense strand
gcauuauugagauuggcauuu

SEQ ID NO: 5089 - DNA, 21 bp, Homo sapiens
aaacttacattaggtccgact

SEQ ID NO: 5090 - RNA, 21 nt, RNAi-sense strand
acuuacauuagguccgacuuu

SEQ ID NO: 5091 - RNA, 21 nt, RNAi-antisense strand
agucggaccuaauguaaguuu

SEQ ID NO: 5092 - DNA, 21 bp, Homo sapiens
aacttacattaggtccgactc

SEQ ID NO: 5093 - RNA, 21 nt, RNAi-sense strand
cuuacauuagguccgacucuu

SEQ ID NO: 5094 - RNA, 21 nt, RNAi-antisense strand
gagucggaccuaauguaaguu

SEQ ID NO: 5095 - DNA, 21 bp, Homo sapiens
aaacacgaaatcgctgatgcc

SEQ ID NO: 5096 - RNA, 21 nt, RNAi-sense strand
acacgaaaucgcugaugccuu

SEQ ID NO: 5097 - RNA, 21 nt, RNAi-antisense strand
ggcaucagcgauuucguguuu

SEQ ID NO: 5098 - DNA, 21 bp, Homo sapiens
aacacgaaatcgctgatgcct

SEQ ID NO: 5099 - RNA, 21 nt, RNAi-sense strand
cacgaaaucgcugaugccuuu

SEQ ID NO: 5100 - RNA, 21 nt, RNAi-antisense strand
aggcaucagcgauuucguguu

SEQ ID NO: 5101 - DNA, 21 bp, Homo sapiens
cagccgaatagctccaagcaa

SEQ ID NO: 5102 - RNA, 21 nt, RNAi-sense strand
gccgaauagcuccaagcaauu

SEQ ID NO: 5103 - RNA, 21 nt, RNAi-antisense strand
uugcuuggagcuauucggcuu

SEQ ID NO: 5104 - DNA, 21 bp, Homo sapiens
caagctgcaatcgatgctgct

SEQ ID NO: 5105 - RNA, 21 nt, RNAi-sense strand
agcugcaaucgaugcugcuuu

SEQ ID NO: 5106 - RNA, 21 nt, RNAi-antisense strand
agcagcaucgauugcagcuuu

SEQ ID NO: 5107 - DNA, 21 bp, Homo sapiens
caatcgatgctgctagacagg

SEQ ID NO: 5108 - RNA, 21 nt, RNAi-sense strand
aucgaugcugcuagacagguu

SEQ ID NO: 5109 - RNA, 21 nt, RNAi-antisense strand
ccugucuagcagcaucgauuu

SEQ ID NO: 5110 - DNA, 21 bp, Homo sapiens
cagcaatacgccaagagcaaa

SEQ ID NO: 5111 - RNA, 21 nt, RNAi-sense strand
gcaauacgccaagagcaaauu

SEQ ID NO: 5112 - RNA, 21 nt, RNAi-antisense strand
uuugcucuuggcguauugcuu

SEQ ID NO: 5113 - DNA, 21 bp, Homo sapiens
cactcaagcggcaaatctgga

SEQ ID NO: 5114 - RNA, 21 nt, RNAi-sense strand
cucaagcggcaaaucuggauu

SEQ ID NO: 5115 - RNA, 21 nt, RNAi-antisense strand
uccagauuugccgcuugaguu

SEQ ID NO: 5116 - DNA, 21 bp, Homo sapiens
cagatatcgtagctgaagagg

SEQ ID NO: 5117 - RNA, 21 nt, RNAi-sense strand
gauaucguagcugaagagguu

SEQ ID NO: 5118 - RNA, 21 nt, RNAi-antisense strand
ccucuucagcuacgauaucuu

SEQ ID NO: 5119 - DNA, 21 bp, Homo sapiens
caatggcacggaatgtaggag

SEQ ID NO: 5120 - RNA, 21 nt, RNAi-sense strand
auggcacggaauguaggaguu

SEQ ID NO: 5121 - RNA, 21 nt, RNAi-antisense strand
cuccuacauuccgugccauuu

SEQ ID NO: 5122 - DNA, 21 bp, Homo sapiens
cagctggaggaggatctaaag

SEQ ID NO: 5123 - RNA, 21 nt, RNAi-sense strand
gcuggaggaggaucuaaaguu

SEQ ID NO: 5124 - RNA, 21 nt, RNAi-antisense strand
cuuuagauccuccuccagcuu

SEQ ID NO: 5125 - DNA, 21 bp, Homo sapiens
caaacgaaatactagcatgcc

SEQ ID NO: 5126 - RNA, 21 nt, RNAi-sense strand
aacgaaauacuagcaugccuu

SEQ ID NO: 5127 - RNA, 21 nt, RNAi-antisense strand
ggcaugcuaguauuucguuuu

SEQ ID NO: 5128 - DNA, 21 bp, Homo sapiens
cagccagattggttgacacag

SEQ ID NO: 5129 - RNA, 21 nt, RNAi-sense strand
gccagauugguugacacaguu

SEQ ID NO: 5130 - RNA, 21 nt, RNAi-antisense strand
cugugucaaccaaucuggcuu

SEQ ID NO: 5131 - DNA, 21 bp, Homo sapiens
cagattggttgacacagattc

SEQ ID NO: 5132 - RNA, 21 nt, RNAi-sense strand
gauugguugacacagauucuu

SEQ ID NO: 5133 - RNA, 21 nt, RNAi-antisense strand
gaaucugugucaaccaaucuu

SEQ ID NO: 5134 - DNA, 21 bp, Homo sapiens
cacctgcgagatgctggtaaa

SEQ ID NO: 5135 - RNA, 21 nt, RNAi-sense strand
ccugcgagaugcugguaaauu

SEQ ID NO: 5136 - RNA, 21 nt, RNAi-antisense strand
uuuaccagcaucucgcagguu

SEQ ID NO: 5137 - DNA, 21 bp, Homo sapiens
caagcatatttcgtctctctt

SEQ ID NO: 5138 - RNA, 21 nt, RNAi-sense strand
agcauauuucgucucucuuuu

SEQ ID NO: 5139 - RNA, 21 nt, RNAi-antisense strand
aagagagacgaaauaugcuuu

SEQ ID NO: 5140 - DNA, 21 bp, Homo sapiens
caaccggtttgattgcttcgt

SEQ ID NO: 5141 - RNA, 21 nt, RNAi-sense strand
accgguuugauugcuucguuu

SEQ ID NO: 5142 - RNA, 21 nt, RNAi-antisense strand
acgaagcaaucaaaccgguuu

SEQ ID NO: 5143 - DNA, 21 bp, Homo sapiens
caacttagtggcatccttatt

SEQ ID NO: 5144 - RNA, 21 nt, RNAi-sense strand
acuuaguggcauccuuauuuu

SEQ ID NO: 5145 - RNA, 21 nt, RNAi-antisense strand
aauaaggaugccacuaaguuu

SEQ ID NO: 5146 - DNA, 21 bp, Homo sapiens
catgaagtccatcgcttcgct

SEQ ID NO: 5147 - RNA, 21 nt, RNAi-sense strand
ugaaguccaucgcuucgcuuu

SEQ ID NO: 5148 - RNA, 21 nt, RNAi-antisense strand
agcgaagcgauggacuucauu

SEQ ID NO: 5149 - DNA, 21 bp, Homo sapiens
catcgcttcgctgttgcttct

SEQ ID NO: 5150 - RNA, 21 nt, RNAi-sense strand
ucgcuucgcuguugcuucuuu

SEQ ID NO: 5151 - RNA, 21 nt, RNAi-antisense strand
agaagcaacagcgaagcgauu

SEQ ID NO: 5152 - DNA, 21 bp, Homo sapiens
cagctgtttggcggcaagttt

SEQ ID NO: 5153 - RNA, 21 nt, RNAi-sense strand
gcuguuuggcggcaaguuuuu

SEQ ID NO: 5154 - RNA, 21 nt, RNAi-antisense strand
aaacuugccgccaaacagcuu

SEQ ID NO: 5155 - DNA, 21 bp, Homo sapiens
caagcggagcacctttgacaa

SEQ ID NO: 5156 - RNA, 21 nt, RNAi-sense strand
agcggagcaccuuugacaauu

SEQ ID NO: 5157 - RNA, 21 nt, RNAi-antisense strand
uugucaaaggugcuccgcuuu

SEQ ID NO: 5158 - DNA, 21 bp, Homo sapiens
caggaatgatcgtctgcatct

SEQ ID NO: 5159 - RNA, 21 nt, RNAi-sense strand
ggaaugaucgucugcaucuuu

SEQ ID NO: 5160 - RNA, 21 nt, RNAi-antisense strand
agaugcagacgaucauuccuu

SEQ ID NO: 5161 - DNA, 21 bp, Homo sapiens
catcgctgtagacaatttggc

SEQ ID NO: 5162 - RNA, 21 nt, RNAi-sense strand
ucgcuguagacaauuuggcuu

SEQ ID NO: 5163 - RNA, 21 nt, RNAi-antisense strand
gccaaauugucuacagcgauu

SEQ ID NO: 5164 - DNA, 21 bp, Homo sapiens
cagaagtcaaccagatagcca

SEQ ID NO: 5165 - RNA, 21 nt, RNAi-sense strand
gaagucaaccagauagccauu

SEQ ID NO: 5166 - RNA, 21 nt, RNAi-antisense strand
uggcuaucugguugacuucuu

SEQ ID NO: 5167 - DNA, 21 bp, Homo sapiens
cagatagccaacagtgacaac

SEQ ID NO: 5168 - RNA, 21 nt, RNAi-sense strand
gauagccaacagugacaacuu

SEQ ID NO: 5169 - RNA, 21 nt, RNAi-antisense strand
guugucacuguuggcuaucuu

SEQ ID NO: 5170 - DNA, 21 bp, Homo sapiens
cactccttccggaacacgata

SEQ ID NO: 5171 - RNA, 21 nt, RNAi-sense strand
cuccuuccggaacacgauauu

SEQ ID NO: 5172 - RNA, 21 nt, RNAi-antisense strand
uaucguguuccggaaggaguu

SEQ ID NO: 5173 - DNA, 21 bp, Homo sapiens
catctccgttgtgaagattct

SEQ ID NO: 5174 - RNA, 21 nt, RNAi-sense strand
ucuccguugugaagauucuuu

SEQ ID NO: 5175 - RNA, 21 nt, RNAi-antisense strand
agaaucuucacaacggagauu

SEQ ID NO: 5176 - DNA, 21 bp, Homo sapiens
caacttcgacaacgtcctctc

SEQ ID NO: 5177 - RNA, 21 nt, RNAi-sense strand
acuucgacaacguccucucuu

SEQ ID NO: 5178 - RNA, 21 nt, RNAi-antisense strand
gagaggacguugucgaaguuu

SEQ ID NO: 5179 - DNA, 21 bp, Homo sapiens
catcgactcgaatggagagaa

SEQ ID NO: 5180 - RNA, 21 nt, RNAi-sense strand
ucgacucgaauggagagaauu

SEQ ID NO: 5181 - RNA, 21 nt, RNAi-antisense strand
uucucuccauucgagucgauu

SEQ ID NO: 5182 - DNA, 21 bp, Homo sapiens
cagtgtgttgaatacgccttg

SEQ ID NO: 5183 - RNA, 21 nt, RNAi-sense strand
guguguugaauacgccuuguu

SEQ ID NO: 5184 - RNA, 21 nt, RNAi-antisense strand
caaggcguauucaacacacuu

SEQ ID NO: 5185 - DNA, 21 bp, Homo sapiens
cagtacaagttctggtacgtg

SEQ ID NO: 5186 - RNA, 21 nt, RNAi-sense strand
guacaaguucugguacguguu

SEQ ID NO: 5187 - RNA, 21 nt, RNAi-antisense strand
cacguaccagaacuuguacuu

SEQ ID NO: 5188 - DNA, 21 bp, Homo sapiens
caagttctggtacgtggtgaa

SEQ ID NO: 5189 - RNA, 21 nt, RNAi-sense strand
aguucugguacguggugaauu

SEQ ID NO: 5190 - RNA, 21 nt, RNAi-antisense strand
uucaccacguaccagaacuuu

SEQ ID NO: 5191 - DNA, 21 bp, Homo sapiens
cactacgagcagtccaagatg

SEQ ID NO: 5192 - RNA, 21 nt, RNAi-sense strand
cuacgagcaguccaagauguu

SEQ ID NO: 5193 - RNA, 21 nt, RNAi-antisense strand
caucuuggacugcucguaguu

SEQ ID NO: 5194 - DNA, 21 bp, Homo sapiens
cagtccaagatgttcaatgat

SEQ ID NO: 5195 - RNA, 21 nt, RNAi-sense strand
guccaagauguucaaugauuu

SEQ ID NO: 5196 - RNA, 21 nt, RNAi-antisense strand
aucauugaacaucuuggacuu

SEQ ID NO: 5197 - DNA, 21 bp, Homo sapiens
catcgtaatcggcagcattat

SEQ ID NO: 5198 - RNA, 21 nt, RNAi-sense strand
ucguaaucggcagcauuauuu

SEQ ID NO: 5199 - RNA, 21 nt, RNAi-antisense strand
auaaugcugccgauuacgauu

SEQ ID NO: 5200 - DNA, 21 bp, Homo sapiens
catgagagataacaaccagat

SEQ ID NO: 5201 - RNA, 21 nt, RNAi-sense strand
ugagagauaacaaccagauuu

SEQ ID NO: 5202 - RNA, 21 nt, RNAi-antisense strand
aucugguuguuaucucucauu

SEQ ID NO: 5203 - DNA, 21 bp, Homo sapiens
caagagattagttgccatgaa

SEQ ID NO: 5204 - RNA, 21 nt, RNAi-sense strand
agagauuaguugccaugaauu

SEQ ID NO: 5205 - RNA, 21 nt, RNAi-antisense strand
uucauggcaacuaaucucuuu

SEQ ID NO: 5206 - DNA, 21 bp, Homo sapiens
cagcatgaaattacttgacca

SEQ ID NO: 5207 - RNA, 21 nt, RNAi-sense strand
gcaugaaauuacuugaccauu

SEQ ID NO: 5208 - RNA, 21 nt, RNAi-antisense strand
uggucaaguaauuucaugcuu

SEQ ID NO: 5209 - DNA, 21 bp, Homo sapiens
cagaaatccggcgtgctatat

SEQ ID NO: 5210 - RNA, 21 nt, RNAi-sense strand
gaaauccggcgugcuauauuu

SEQ ID NO: 5211 - RNA, 21 nt, RNAi-antisense strand
auauagcacgccggauuucuu

SEQ ID NO: 5212 - DNA, 21 bp, Homo sapiens
caagatgacgagcctgaggaa

SEQ ID NO: 5213 - RNA, 21 nt, RNAi-sense strand
agaugacgagccugaggaauu

SEQ ID NO: 5214 - RNA, 21 nt, RNAi-antisense strand
uuccucaggcucgucaucuuu

SEQ ID NO: 5215 - DNA, 21 bp, Homo sapiens
cagcaggaaattcggtgtgtc

SEQ ID NO: 5216 - RNA, 21 nt, RNAi-sense strand
gcaggaaauucggugugucuu

SEQ ID NO: 5217 - RNA, 21 nt, RNAi-antisense strand
gacacaccgaauuuccugcuu

SEQ ID NO: 5218 - DNA, 21 bp, Homo sapiens
caggaaattcggtgtgtcata

SEQ ID NO: 5219 - RNA, 21 nt, RNAi-sense strand
ggaaauucggugugucauauu

SEQ ID NO: 5220 - RNA, 21 nt, RNAi-antisense strand
uaugacacaccgaauuuccuu

SEQ ID NO: 5221 - DNA, 21 bp, Homo sapiens
cattaggtccgactcaggaga

SEQ ID NO: 5222 - RNA, 21 nt, RNAi-sense strand
uuagguccgacucaggagauu

SEQ ID NO: 5223 - RNA, 21 nt, RNAi-antisense strand
ucuccugagucggaccuaauu

SEQ ID NO: 5224 - DNA, 21 bp, Homo sapiens
caggagtatttcagtagtgag

SEQ ID NO: 5225 - RNA, 21 nt, RNAi-sense strand
ggaguauuucaguagugaguu

SEQ ID NO: 5226 - RNA, 21 nt, RNAi-antisense strand
cucacuacugaaauacuccuu

SEQ ID NO: 5227 - DNA, 21 bp, Homo sapiens
catctaatgcagcaacagatc

SEQ ID NO: 5228 - RNA, 21 nt, RNAi-sense strand
ucuaaugcagcaacagaucuu

SEQ ID NO: 5229 - RNA, 21 nt, RNAi-antisense strand
gaucuguugcugcauuagauu

SEQ ID NO: 5230 - DNA, 21 bp, Homo sapiens
cagaagtactcaccgagtcac

SEQ ID NO: 5231 - RNA, 21 nt, RNAi-sense strand
gaaguacucaccgagucacuu

SEQ ID NO: 5232 - RNA, 21 nt, RNAi-antisense strand
gugacucggugaguacuucuu

SEQ ID NO: 5233 - DNA, 21 bp, Homo sapiens
catctcctaccggactttcac

SEQ ID NO: 5234 - RNA, 21 nt, RNAi-sense strand
ucuccuaccggacuuucacuu

SEQ ID NO: 5235 - RNA, 21 nt, RNAi-antisense strand
gugaaaguccgguaggagauu

SEQ ID NO: 5236 - DNA, 21 bp, Homo sapiens
cacgaaatcgctgatgcctgt

SEQ ID NO: 5237 - RNA, 21 nt, RNAi-sense strand
cgaaaucgcugaugccuguuu

SEQ ID NO: 5238 - RNA, 21 nt, RNAi-antisense strand
acaggcaucagcgauuucguu

SEQ ID NO: 5239 - DNA, 21 bp, Homo sapiens
gaatagctccaagcaaactgt

SEQ ID NO: 5240 - RNA, 21 nt, RNAi-sense strand
auagcuccaagcaaacuguuu

SEQ ID NO: 5241 - RNA, 21 nt, RNAi-antisense strand
acaguuugcuuggagcuauuu

SEQ ID NO: 5242 - DNA, 21 bp, Homo sapiens
gaagagcctgcattagtatag

SEQ ID NO: 5243 - RNA, 21 nt, RNAi-sense strand
agagccugcauuaguauaguu

SEQ ID NO: 5244 - RNA, 21 nt, RNAi-antisense strand
cuauacuaaugcaggcucuuu

SEQ ID NO: 5245 - DNA, 21 bp, Homo sapiens
gagcctgcattagtatagtgg

SEQ ID NO: 5246 - RNA, 21 nt, RNAi-sense strand
gccugcauuaguauagugguu

SEQ ID NO: 5247 - RNA, 21 nt, RNAi-antisense strand
ccacuauacuaaugcaggcuu

SEQ ID NO: 5248 - DNA, 21 bp, Homo sapiens
gaatggatggaatttactgga

SEQ ID NO: 5249 - RNA, 21 nt, RNAi-sense strand
auggauggaauuuacuggauu

SEQ ID NO: 5250 - RNA, 21 nt, RNAi-antisense strand
uccaguaaauuccauccauuu

SEQ ID NO: 5251 - DNA, 21 bp, Homo sapiens
gaaccactcaagcggcaaatc

SEQ ID NO: 5252 - RNA, 21 nt, RNAi-sense strand
accacucaagcggcaaaucuu

SEQ ID NO: 5253 - RNA, 21 nt, RNAi-antisense strand
gauuugccgcuugagugguuu

SEQ ID NO: 5254 - DNA, 21 bp, Homo sapiens
gaccacttcgactagtgtcag

SEQ ID NO: 5255 - RNA, 21 nt, RNAi-sense strand
ccacuucgacuagugucaguu

SEQ ID NO: 5256 - RNA, 21 nt, RNAi-antisense strand
cugacacuagucgaagugguu

SEQ ID NO: 5257 - DNA, 21 bp, Homo sapiens
gactcagatatcgtagctgaa

SEQ ID NO: 5258 - RNA, 21 nt, RNAi-sense strand
cucagauaucguagcugaauu

SEQ ID NO: 5259 - RNA, 21 nt, RNAi-antisense strand
uucagcuacgauaucugaguu

SEQ ID NO: 5260 - DNA, 21 bp, Homo sapiens
gatatcgtagctgaagaggac

SEQ ID NO: 5261 - RNA, 21 nt, RNAi-sense strand
uaucguagcugaagaggacuu

SEQ ID NO: 5262 - RNA, 21 nt, RNAi-antisense strand
guccucuucagcuacgauauu

SEQ ID NO: 5263 - DNA, 21 bp, Homo sapiens
gaggacatcgatccggagaat

SEQ ID NO: 5264 - RNA, 21 nt, RNAi-sense strand
ggacaucgauccggagaauuu

SEQ ID NO: 5265 - RNA, 21 nt, RNAi-antisense strand
auucuccggaucgauguccuu

SEQ ID NO: 5266 - DNA, 21 bp, Homo sapiens
gacatcgatccggagaatgag

SEQ ID NO: 5267 - RNA, 21 nt, RNAi-sense strand
caucgauccggagaaugaguu

SEQ ID NO: 5268 - RNA, 21 nt, RNAi-antisense strand
cucauucuccggaucgauguu

SEQ ID NO: 5269 - DNA, 21 bp, Homo sapiens
gaaggcaaacgaaatactagc

SEQ ID NO: 5270 - RNA, 21 nt, RNAi-sense strand
aggcaaacgaaauacuagcuu

SEQ ID NO: 5271 - RNA, 21 nt, RNAi-antisense strand
gcuaguauuucguuugccuuu

SEQ ID NO: 5272 - DNA, 21 bp, Homo sapiens
gattcaatcgcagaagatgta

SEQ ID NO: 5273 - RNA, 21 nt, RNAi-sense strand
uucaaucgcagaagauguauu

SEQ ID NO: 5274 - RNA, 21 nt, RNAi-antisense strand
uacaucuucugcgauugaauu

SEQ ID NO: 5275 - DNA, 21 bp, Homo sapiens
gattgcttcgtggtgtgtggt

SEQ ID NO: 5276 - RNA, 21 nt, RNAi-sense strand
uugcuucguggugugugguuu

SEQ ID NO: 5277 - RNA, 21 nt, RNAi-antisense strand
accacacaccacgaagcaauu

SEQ ID NO: 5278 - DNA, 21 bp, Homo sapiens
gagcaacttagtggcatcctt

SEQ ID NO: 5279 - RNA, 21 nt, RNAi-sense strand
gcaacuuaguggcauccuuuu

SEQ ID NO: 5280 - RNA, 21 nt, RNAi-antisense strand
aaggaugccacuaaguugcuu

SEQ ID NO: 5281 - DNA, 21 bp, Homo sapiens
gaagtccatcgcttcgctgtt

SEQ ID NO: 5282 - RNA, 21 nt, RNAi-sense strand
aguccaucgcuucgcuguuuu

SEQ ID NO: 5283 - RNA, 21 nt, RNAi-antisense strand
aacagcgaagcgauggacuuu

SEQ ID NO: 5284 - DNA, 21 bp, Homo sapiens
gatgaaacgcaaaccaagcgg

SEQ ID NO: 5285 - RNA, 21 nt, RNAi-sense strand
ugaaacgcaaaccaagcgguu

SEQ ID NO: 5286 - RNA, 21 nt, RNAi-antisense strand
ccgcuugguuugcguuucauu

SEQ ID NO: 5287 - DNA, 21 bp, Homo sapiens
gaatgctgtgatgtacgatgg

SEQ ID NO: 5288 - RNA, 21 nt, RNAi-sense strand
augcugugauguacgaugguu

SEQ ID NO: 5289 - RNA, 21 nt, RNAi-antisense strand
ccaucguacaucacagcauuu

SEQ ID NO: 5290 - DNA, 21 bp, Homo sapiens
gatgtacgatggcatcatggc

SEQ ID NO: 5291 - RNA, 21 nt, RNAi-sense strand
uguacgauggcaucauggcuu

SEQ ID NO: 5292 - RNA, 21 nt, RNAi-antisense strand
gccaugaugccaucguacauu

SEQ ID NO: 5293 - DNA, 21 bp, Homo sapiens
gaatgatcgtctgcatctact

SEQ ID NO: 5294 - RNA, 21 nt, RNAi-sense strand
augaucgucugcaucuacuuu

SEQ ID NO: 5295 - RNA, 21 nt, RNAi-antisense strand
aguagaugcagacgaucauuu

SEQ ID NO: 5296 - DNA, 21 bp, Homo sapiens
gatcgtctgcatctacttcat

SEQ ID NO: 5297 - RNA, 21 nt, RNAi-sense strand
ucgucugcaucuacuucauuu

SEQ ID NO: 5298 - RNA, 21 nt, RNAi-antisense strand
augaaguagaugcagacgauu

SEQ ID NO: 5299 - DNA, 21 bp, Homo sapiens
gacaatttggctgatgctgaa

SEQ ID NO: 5300 - RNA, 21 nt, RNAi-sense strand
caauuuggcugaugcugaauu

SEQ ID NO: 5301 - RNA, 21 nt, RNAi-antisense strand
uucagcaucagccaaauuguu

SEQ ID NO: 5302 - DNA, 21 bp, Homo sapiens
gaagtcaaccagatagccaac

SEQ ID NO: 5303 - RNA, 21 nt, RNAi-sense strand
agucaaccagauagccaacuu

SEQ ID NO: 5304 - RNA, 21 nt, RNAi-antisense strand
guuggcuaucugguugacuuu

SEQ ID NO: 5305 - DNA, 21 bp, Homo sapiens
gaactacttcaatttgctgga

SEQ ID NO: 5306 - RNA, 21 nt, RNAi-sense strand
acuacuucaauuugcuggauu

SEQ ID NO: 5307 - RNA, 21 nt, RNAi-antisense strand
uccagcaaauugaaguaguuu

SEQ ID NO: 5308 - DNA, 21 bp, Homo sapiens
gacttaagcacgtggtccagt

SEQ ID NO: 5309 - RNA, 21 nt, RNAi-sense strand
cuuaagcacgugguccaguuu

SEQ ID NO: 5310 - RNA, 21 nt, RNAi-antisense strand
acuggaccacgugcuuaaguu

SEQ ID NO: 5311 - DNA, 21 bp, Homo sapiens
gaagttctatcgctgtacgga

SEQ ID NO: 5312 - RNA, 21 nt, RNAi-sense strand
aguucuaucgcuguacggauu

SEQ ID NO: 5313 - RNA, 21 nt, RNAi-antisense strand
uccguacagcgauagaacuuu

SEQ ID NO: 5314 - DNA, 21 bp, Homo sapiens
gatttcaacttcgacaacgtc

SEQ ID NO: 5315 - RNA, 21 nt, RNAi-sense strand
uuucaacuucgacaacgucuu

SEQ ID NO: 5316 - RNA, 21 nt, RNAi-antisense strand
gacguugucgaaguugaaauu

SEQ ID NO: 5317 - DNA, 21 bp, Homo sapiens
gacaacgtcctctctgctatg

SEQ ID NO: 5318 - RNA, 21 nt, RNAi-sense strand
caacguccucucugcuauguu

SEQ ID NO: 5319 - RNA, 21 nt, RNAi-antisense strand
cauagcagagaggacguuguu

SEQ ID NO: 5320 - DNA, 21 bp, Homo sapiens
gaatacgccttgaaagcacgt

SEQ ID NO: 5321 - RNA, 21 nt, RNAi-sense strand
auacgccuugaaagcacguuu

SEQ ID NO: 5322 - RNA, 21 nt, RNAi-antisense strand
acgugcuuucaaggcguauuu

SEQ ID NO: 5323 - DNA, 21 bp, Homo sapiens
gaactcttcgcctttcgaata

SEQ ID NO: 5324 - RNA, 21 nt, RNAi-sense strand
acucuucgccuuucgaauauu

SEQ ID NO: 5325 - RNA, 21 nt, RNAi-antisense strand
uauucgaaaggcgaagaguuu

SEQ ID NO: 5326 - DNA, 21 bp, Homo sapiens
gagcagtccaagatgttcaat

SEQ ID NO: 5327 - RNA, 21 nt, RNAi-sense strand
gcaguccaagauguucaauuu

SEQ ID NO: 5328 - RNA, 21 nt, RNAi-antisense strand
auugaacaucuuggacugcuu

SEQ ID NO: 5329 - DNA, 21 bp, Homo sapiens
gaagagagcaatagaatctcc

SEQ ID NO: 5330 - RNA, 21 nt, RNAi-sense strand
agagagcaauagaaucuccuu

SEQ ID NO: 5331 - RNA, 21 nt, RNAi-antisense strand
ggagauucuauugcucucuuu

SEQ ID NO: 5332 - DNA, 21 bp, Homo sapiens
gagtgatgcgattggtgaagc

SEQ ID NO: 5333 - RNA, 21 nt, RNAi-sense strand
gugaugcgauuggugaagcuu

SEQ ID NO: 5334 - RNA, 21 nt, RNAi-antisense strand
gcuucaccaaucgcaucacuu

SEQ ID NO: 5335 - DNA, 21 bp, Homo sapiens
gatgcgattggtgaagcttct

SEQ ID NO: 5336 - RNA, 21 nt, RNAi-sense strand
ugcgauuggugaagcuucuuu

SEQ ID NO: 5337 - RNA, 21 nt, RNAi-antisense strand
agaagcuucaccaaucgcauu

SEQ ID NO: 5338 - DNA, 21 bp, Homo sapiens
gaaagttgccatgagagataa

SEQ ID NO: 5339 - RNA, 21 nt, RNAi-sense strand
aaguugccaugagagauaauu

SEQ ID NO: 5340 - RNA, 21 nt, RNAi-antisense strand
uuaucucucauggcaacuuuu

SEQ ID NO: 5341 - DNA, 21 bp, Homo sapiens
gagagataacaaccagatcaa

SEQ ID NO: 5342 - RNA, 21 nt, RNAi-sense strand
gagauaacaaccagaucaauu

SEQ ID NO: 5343 - RNA, 21 nt, RNAi-antisense strand
uugaucugguuguuaucucuu

SEQ ID NO: 5344 - DNA, 21 bp, Homo sapiens
gataacaaccagatcaatagg

SEQ ID NO: 5345 - RNA, 21 nt, RNAi-sense strand
uaacaaccagaucaauagguu

SEQ ID NO: 5346 - RNA, 21 nt, RNAi-antisense strand
ccuauugaucugguuguuauu

SEQ ID NO: 5347 - DNA, 21 bp, Homo sapiens
gaacggctcttaagatcaaga

SEQ ID NO: 5348 - RNA, 21 nt, RNAi-sense strand
acggcucuuaagaucaagauu

SEQ ID NO: 5349 - RNA, 21 nt, RNAi-antisense strand
ucuugaucuuaagagccguuu

SEQ ID NO: 5350 - DNA, 21 bp, Homo sapiens
gaacctggagcaagctaatga

SEQ ID NO: 5351 - RNA, 21 nt, RNAi-sense strand
accuggagcaagcuaaugauu

SEQ ID NO: 5352 - RNA, 21 nt, RNAi-antisense strand
ucauuagcuugcuccagguuu

SEQ ID NO: 5353 - DNA, 21 bp, Homo sapiens
gaagttctatgccactttcct

SEQ ID NO: 5354 - RNA, 21 nt, RNAi-sense strand
aguucuaugccacuuuccuuu

SEQ ID NO: 5355 - RNA, 21 nt, RNAi-antisense strand
aggaaaguggcauagaacuuu

SEQ ID NO: 5356 - DNA, 21 bp, Homo sapiens
gaaatccggcgtgctatatcg

SEQ ID NO: 5357 - RNA, 21 nt, RNAi-sense strand
aauccggcgugcuauaucguu

SEQ ID NO: 5358 - RNA, 21 nt, RNAi-antisense strand
cgauauagcacgccggauuuu

SEQ ID NO: 5359 - DNA, 21 bp, Homo sapiens
gatttgcaagatgacgagcct

SEQ ID NO: 5360 - RNA, 21 nt, RNAi-sense strand
uuugcaagaugacgagccuuu

SEQ ID NO: 5361 - RNA, 21 nt, RNAi-antisense strand
aggcucgucaucuugcaaauu

SEQ ID NO: 5362 - DNA, 21 bp, Homo sapiens
gatactgagaaaccgctgttt

SEQ ID NO: 5363 - RNA, 21 nt, RNAi-sense strand
uacugagaaaccgcuguuuuu

SEQ ID NO: 5364 - RNA, 21 nt, RNAi-antisense strand
aaacagcgguuucucaguauu

SEQ ID NO: 5365 - DNA, 21 bp, Homo sapiens
gaaattcggtgtgtcataacc

SEQ ID NO: 5366 - RNA, 21 nt, RNAi-sense strand
aauucggugugucauaaccuu

SEQ ID NO: 5367 - RNA, 21 nt, RNAi-antisense strand
gguuaugacacaccgaauuuu

SEQ ID NO: 5368 - DNA, 21 bp, Homo sapiens
gaaacttacattaggtccgac

SEQ ID NO: 5369 - RNA, 21 nt, RNAi-sense strand
aacuuacauuagguccgacuu

SEQ ID NO: 5370 - RNA, 21 nt, RNAi-antisense strand
gucggaccuaauguaaguuuu

SEQ ID NO: 5371 - DNA, 21 bp, Homo sapiens
gaggaatgctacgaggatgac

SEQ ID NO: 5372 - RNA, 21 nt, RNAi-sense strand
ggaaugcuacgaggaugacuu

SEQ ID NO: 5373 - RNA, 21 nt, RNAi-antisense strand
gucauccucguagcauuccuu

SEQ ID NO: 5374 - DNA, 21 bp, Homo sapiens
gaatgctacgaggatgacagc

SEQ ID NO: 5375 - RNA, 21 nt, RNAi-sense strand
augcuacgaggaugacagcuu

SEQ ID NO: 5376 - RNA, 21 nt, RNAi-antisense strand
gcugucauccucguagcauuu

SEQ ID NO: 5377 - DNA, 21 bp, Homo sapiens
gaaacatcgactctgagaggc

SEQ ID NO: 5378 - RNA, 21 nt, RNAi-sense strand
aacaucgacucugagaggcuu

SEQ ID NO: 5379 - RNA, 21 nt, RNAi-antisense strand
gccucucagagucgauguuuu

SEQ ID NO: 5380 - DNA, 21 bp, Homo sapiens
gaagtactcaccgagtcactc

SEQ ID NO: 5381 - RNA, 21 nt, RNAi-sense strand
aguacucaccgagucacucuu

SEQ ID NO: 5382 - RNA, 21 nt, RNAi-antisense strand
gagugacucggugaguacuuu

SEQ ID NO: 5383 - DNA, 21 bp, Homo sapiens
gacatctcctaccggactttc

SEQ ID NO: 5384 - RNA, 21 nt, RNAi-sense strand
caucuccuaccggacuuucuu

SEQ ID NO: 5385 - RNA, 21 nt, RNAi-antisense strand
gaaaguccgguaggagauguu

SEQ ID NO: 5386 - DNA, 21 bp, Homo sapiens
gactatgagctacaggacttt

SEQ ID NO: 5387 - RNA, 21 nt, RNAi-sense strand
cuaugagcuacaggacuuuuu

SEQ ID NO: 5388 - RNA, 21 nt, RNAi-antisense strand
aaaguccuguagcucauaguu

SEQ ID NO: 5389 - DNA, 21 bp, Homo sapiens
tagctccaagcaaactgtcct

SEQ ID NO: 5390 - RNA, 21 nt, RNAi-sense strand
gcuccaagcaaacuguccuuu

SEQ ID NO: 5391 - RNA, 21 nt, RNAi-antisense strand
aggacaguuugcuuggagcuu

SEQ ID NO: 5392 - DNA, 21 bp, Homo sapiens
tatagcgtatggattattgct

SEQ ID NO: 5393 - RNA, 21 nt, RNAi-sense strand
uagcguauggauuauugcuuu

SEQ ID NO: 5394 - RNA, 21 nt, RNAi-antisense strand
agcaauaauccauacgcuauu

SEQ ID NO: 5395 - DNA, 21 bp, Homo sapiens
taatgcttatgttaggaatgg

SEQ ID NO: 5396 - RNA, 21 nt, RNAi-sense strand
augcuuauguuaggaaugguu

SEQ ID NO: 5397 - RNA, 21 nt, RNAi-antisense strand
ccauuccuaacauaagcauuu

SEQ ID NO: 5398 - DNA, 21 bp, Homo sapiens
tagtctgatcatccttggctc

SEQ ID NO: 5399 - RNA, 21 nt, RNAi-sense strand
gucugaucauccuuggcucuu

SEQ ID NO: 5400 - RNA, 21 nt, RNAi-antisense strand
gagccaaggaugaucagacuu

SEQ ID NO: 5401 - DNA, 21 bp, Homo sapiens
tagacaatttggctgatgctg

SEQ ID NO: 5402 - RNA, 21 nt, RNAi-sense strand
gacaauuuggcugaugcuguu

SEQ ID NO: 5403 - RNA, 21 nt, RNAi-antisense strand
cagcaucagccaaauugucuu

SEQ ID NO: 5404 - DNA, 21 bp, Homo sapiens
tacttcaatttgctggatatg

SEQ ID NO: 5405 - RNA, 21 nt, RNAi-sense strand
cuucaauuugcuggauauguu

SEQ ID NO: 5406 - RNA, 21 nt, RNAi-antisense strand
cauauccagcaaauugaaguu

SEQ ID NO: 5407 - DNA, 21 bp, Homo sapiens
tatgatggcgctcttcacagt

SEQ ID NO: 5408 - RNA, 21 nt, RNAi-sense strand
ugauggcgcucuucacaguuu

SEQ ID NO: 5409 - RNA, 21 nt, RNAi-antisense strand
acugugaagagcgccaucauu

SEQ ID NO: 5410 - DNA, 21 bp, Homo sapiens
tataaagccatcgactcgaat

SEQ ID NO: 5411 - RNA, 21 nt, RNAi-sense strand
uaaagccaucgacucgaauuu

SEQ ID NO: 5412 - RNA, 21 nt, RNAi-antisense strand
auucgagucgauggcuuuauu

SEQ ID NO: 5413 - DNA, 21 bp, Homo sapiens
taaagccatcgactcgaatgg

SEQ ID NO: 5414 - RNA, 21 nt, RNAi-sense strand
aagccaucgacucgaaugguu

SEQ ID NO: 5415 - RNA, 21 nt, RNAi-antisense strand
ccauucgagucgauggcuuuu

SEQ ID NO: 5416 - DNA, 21 bp, Homo sapiens
taccagtacaagttctggtac

SEQ ID NO: 5417 - RNA, 21 nt, RNAi-sense strand
ccaguacaaguucugguacuu

SEQ ID NO: 5418 - RNA, 21 nt, RNAi-antisense strand
guaccagaacuuguacugguu

SEQ ID NO: 5419 - DNA, 21 bp, Homo sapiens
tacaagttctggtacgtggtg

SEQ ID NO: 5420 - RNA, 21 nt, RNAi-sense strand
caaguucugguacgugguguu

SEQ ID NO: 5421 - RNA, 21 nt, RNAi-antisense strand
caccacguaccagaacuuguu

SEQ ID NO: 5422 - DNA, 21 bp, Homo sapiens
tacgagcagtccaagatgttc

SEQ ID NO: 5423 - RNA, 21 nt, RNAi-sense strand
cgagcaguccaagauguucuu

SEQ ID NO: 5424 - RNA, 21 nt, RNAi-antisense strand
gaacaucuuggacugcucguu

SEQ ID NO: 5425 - DNA, 21 bp, Homo sapiens
tagcgtgcaagagattagttg

SEQ ID NO: 5426 - RNA, 21 nt, RNAi-sense strand
gcgugcaagagauuaguuguu

SEQ ID NO: 5427 - RNA, 21 nt, RNAi-antisense strand
caacuaaucucuugcacgcuu

SEQ ID NO: 5428 - DNA, 21 bp, Homo sapiens
tacaggactactttaggaaat

SEQ ID NO: 5429 - RNA, 21 nt, RNAi-sense strand
caggacuacuuuaggaaauuu

SEQ ID NO: 5430 - RNA, 21 nt, RNAi-antisense strand
auuuccuaaaguaguccuguu

SEQ ID NO: 5431 - DNA, 21 bp, Homo sapiens
tacattaggtccgactcagga

SEQ ID NO: 5432 - RNA, 21 nt, RNAi-sense strand
cauuagguccgacucaggauu

SEQ ID NO: 5433 - RNA, 21 nt, RNAi-antisense strand
uccugagucggaccuaauguu

SEQ ID NO: 5434 - DNA, 21 bp, Homo sapiens
tatgagctacaggactttggt

SEQ ID NO: 5435 - RNA, 21 nt, RNAi-sense strand
ugagcuacaggacuuugguuu

SEQ ID NO: 5436 - RNA, 21 nt, RNAi-antisense strand
accaaaguccuguagcucauu

SEQ ID NO: 5437 - DNA, 21 bp, Homo sapiens
aagagctgcagtttcagccgc

SEQ ID NO: 5438 - RNA, 21 nt, RNAi-sense strand
gagcugcaguuucagccgcuu

SEQ ID NO: 5439 - RNA, 21 nt, RNAi-antisense strand
gcggcugaaacugcagcucuu

SEQ ID NO: 5440 - DNA, 21 bp, Homo sapiens
aaggcgagcagagatatcctc

SEQ ID NO: 5441 - RNA, 21 nt, RNAi-sense strand
ggcgagcagagauauccucuu

SEQ ID NO: 5442 - RNA, 21 nt, RNAi-antisense strand
gaggauaucucugcucgccuu

SEQ ID NO: 5443 - DNA, 21 bp, Homo sapiens
aagcaaagaacattaaggaag

SEQ ID NO: 5444 - RNA, 21 nt, RNAi-sense strand
gcaaagaacauuaaggaaguu

SEQ ID NO: 5445 - RNA, 21 nt, RNAi-antisense strand
cuuccuuaauguucuuugcuu

SEQ ID NO: 5446 - DNA, 21 bp, Homo sapiens
aaagaacattaaggaaggaag

SEQ ID NO: 5447 - RNA, 21 nt, RNAi-sense strand
agaacauuaaggaaggaaguu

SEQ ID NO: 5448 - RNA, 21 nt, RNAi-antisense strand
cuuccuuccuuaauguucuuu

SEQ ID NO: 5449 - DNA, 21 bp, Homo sapiens
aagaacattaaggaaggaagg

SEQ ID NO: 5450 - RNA, 21 nt, RNAi-sense strand
gaacauuaaggaaggaagguu

SEQ ID NO: 5451 - RNA, 21 nt, RNAi-antisense strand
ccuuccuuccuuaauguucuu

SEQ ID NO: 5452 - DNA, 21 bp, Homo sapiens
aacattaaggaaggaaggagg

SEQ ID NO: 5453 - RNA, 21 nt, RNAi-sense strand
cauuaaggaaggaaggagguu

SEQ ID NO: 5454 - RNA, 21 nt, RNAi-antisense strand
ccuccuuccuuccuuaauguu

SEQ ID NO: 5455 - DNA, 21 bp, Homo sapiens
aaggaaggaaggaggaatgag

SEQ ID NO: 5456 - RNA, 21 nt, RNAi-sense strand
ggaaggaaggaggaaugaguu

SEQ ID NO: 5457 - RNA, 21 nt, RNAi-antisense strand
cucauuccuccuuccuuccuu

SEQ ID NO: 5458 - DNA, 21 bp, Homo sapiens
aaggaaggaggaatgaggctg

SEQ ID NO: 5459 - RNA, 21 nt, RNAi-sense strand
ggaaggaggaaugaggcuguu

SEQ ID NO: 5460 - RNA, 21 nt, RNAi-antisense strand
cagccucauuccuccuuccuu

SEQ ID NO: 5461 - DNA, 21 bp, Homo sapiens
aaggaggaatgaggctggata

SEQ ID NO: 5462 - RNA, 21 nt, RNAi-sense strand
ggaggaaugaggcuggauauu

SEQ ID NO: 5463 - RNA, 21 nt, RNAi-antisense strand
uauccagccucauuccuccuu

SEQ ID NO: 5464 - DNA, 21 bp, Homo sapiens
aatgaggctggatacggtgca

SEQ ID NO: 5465 - RNA, 21 nt, RNAi-sense strand
ugaggcuggauacggugcauu

SEQ ID NO: 5466 - RNA, 21 nt, RNAi-antisense strand
ugcaccguauccagccucauu

SEQ ID NO: 5467 - DNA, 21 bp, Homo sapiens
aacttaccgctacttcttgct

SEQ ID NO: 5468 - RNA, 21 nt, RNAi-sense strand
cuuaccgcuacuucuugcuuu

SEQ ID NO: 5469 - RNA, 21 nt, RNAi-antisense strand
agcaagaaguagcgguaaguu

SEQ ID NO: 5470 - DNA, 21 bp, Homo sapiens
aactctctcaactccactatc

SEQ ID NO: 5471 - RNA, 21 nt, RNAi-sense strand
cucucucaacuccacuaucuu

SEQ ID NO: 5472 - RNA, 21 nt, RNAi-antisense strand
gauaguggaguugagagaguu

SEQ ID NO: 5473 - DNA, 21 bp, Homo sapiens
aactccactatcaaagaggac

SEQ ID NO: 5474 - RNA, 21 nt, RNAi-sense strand
cuccacuaucaaagaggacuu

SEQ ID NO: 5475 - RNA, 21 nt, RNAi-antisense strand
guccucuuugauaguggaguu

SEQ ID NO: 5476 - DNA, 21 bp, Homo sapiens
aaatgagctgaaccgttcaaa

SEQ ID NO: 5477 - RNA, 21 nt, RNAi-sense strand
augagcugaaccguucaaauu

SEQ ID NO: 5478 - RNA, 21 nt, RNAi-antisense strand
uuugaacgguucagcucauuu

SEQ ID NO: 5479 - DNA, 21 bp, Homo sapiens
aaaggagctggatgtggaatc

SEQ ID NO: 5480 - RNA, 21 nt, RNAi-sense strand
aggagcuggauguggaaucuu

SEQ ID NO: 5481 - RNA, 21 nt, RNAi-antisense strand
gauuccacauccagcuccuuu

SEQ ID NO: 5482 - DNA, 21 bp, Homo sapiens
aaggagctggatgtggaatca

SEQ ID NO: 5483 - RNA, 21 nt, RNAi-sense strand
ggagcuggauguggaaucauu

SEQ ID NO: 5484 - RNA, 21 nt, RNAi-antisense strand
ugauuccacauccagcuccuu

SEQ ID NO: 5485 - DNA, 21 bp, Homo sapiens
aatcagttctttctcctggag

SEQ ID NO: 5486 - RNA, 21 nt, RNAi-sense strand
ucaguucuuucuccuggaguu

SEQ ID NO: 5487 - RNA, 21 nt, RNAi-antisense strand
cuccaggagaaagaacugauu

SEQ ID NO: 5488 - DNA, 21 bp, Homo sapiens
aatacacaggatccgattatc

SEQ ID NO: 5489 - RNA, 21 nt, RNAi-sense strand
uacacaggauccgauuaucuu

SEQ ID NO: 5490 - RNA, 21 nt, RNAi-antisense strand
gauaaucggauccuguguauu

SEQ ID NO: 5491 - DNA, 21 bp, Homo sapiens
aagttacattcagaccaggat

SEQ ID NO: 5492 - RNA, 21 nt, RNAi-sense strand
guuacauucagaccaggauuu

SEQ ID NO: 5493 - RNA, 21 nt, RNAi-antisense strand
auccuggucugaauguaacuu

SEQ ID NO: 5494 - DNA, 21 bp, Homo sapiens
aatatatcctttcaggagatg

SEQ ID NO: 5495 - RNA, 21 nt, RNAi-sense strand
uauauccuuucaggagauguu

SEQ ID NO: 5496 - RNA, 21 nt, RNAi-antisense strand
caucuccugaaaggauauauu

SEQ ID NO: 5497 - DNA, 21 bp, Homo sapiens
aaacacaggcgacatacaggc

SEQ ID NO: 5498 - RNA, 21 nt, RNAi-sense strand
acacaggcgacauacaggcuu

SEQ ID NO: 5499 - RNA, 21 nt, RNAi-antisense strand
gccuguaugucgccuguguuu

SEQ ID NO: 5500 - DNA, 21 bp, Homo sapiens
aacacaggcgacatacaggcc

SEQ ID NO: 5501 - RNA, 21 nt, RNAi-sense strand
cacaggcgacauacaggccuu

SEQ ID NO: 5502 - RNA, 21 nt, RNAi-antisense strand
ggccuguaugucgccuguguu

SEQ ID NO: 5503 - DNA, 21 bp, Homo sapiens
aagctataaacagaaggacag

SEQ ID NO: 5504 - RNA, 21 nt, RNAi-sense strand
gcuauaaacagaaggacaguu

SEQ ID NO: 5505 - RNA, 21 nt, RNAi-antisense strand
cuguccuucuguuuauagcuu

SEQ ID NO: 5506 - DNA, 21 bp, Homo sapiens
aattcatcatcaagatccatg

SEQ ID NO: 5507 - RNA, 21 nt, RNAi-sense strand
uucaucaucaagauccauguu

SEQ ID NO: 5508 - RNA, 21 nt, RNAi-antisense strand
cauggaucuugaugaugaauu

SEQ ID NO: 5509 - DNA, 21 bp, Homo sapiens
aagatccatgacatcaatgac

SEQ ID NO: 5510 - RNA, 21 nt, RNAi-sense strand
gauccaugacaucaaugacuu

SEQ ID NO: 5511 - RNA, 21 nt, RNAi-antisense strand
gucauugaugucauggaucuu

SEQ ID NO: 5512 - DNA, 21 bp, Homo sapiens
aatgaaccaatattcaccaag

SEQ ID NO: 5513 - RNA, 21 nt, RNAi-sense strand
ugaaccaauauucaccaaguu

SEQ ID NO: 5514 - RNA, 21 nt, RNAi-antisense strand
cuuggugaauauugguucauu

SEQ ID NO: 5515 - DNA, 21 bp, Homo sapiens
aaccaatattcaccaaggagg

SEQ ID NO: 5516 - RNA, 21 nt, RNAi-sense strand
ccaauauucaccaaggagguu

SEQ ID NO: 5517 - RNA, 21 nt, RNAi-antisense strand
ccuccuuggugaauauugguu

SEQ ID NO: 5518 - DNA, 21 bp, Homo sapiens
aatattcaccaaggaggttta

SEQ ID NO: 5519 - RNA, 21 nt, RNAi-sense strand
uauucaccaaggagguuuauu

SEQ ID NO: 5520 - RNA, 21 nt, RNAi-antisense strand
uaaaccuccuuggugaauauu

SEQ ID NO: 5521 - DNA, 21 bp, Homo sapiens
aaggaggtttacacagccact

SEQ ID NO: 5522 - RNA, 21 nt, RNAi-sense strand
ggagguuuacacagccacuuu

SEQ ID NO: 5523 - RNA, 21 nt, RNAi-antisense strand
aguggcuguguaaaccuccuu

SEQ ID NO: 5524 - DNA, 21 bp, Homo sapiens
aaatgtctgatgtcggtacat

SEQ ID NO: 5525 - RNA, 21 nt, RNAi-sense strand
augucugaugucgguacauuu

SEQ ID NO: 5526 - RNA, 21 nt, RNAi-antisense strand
auguaccgacaucagacauuu

SEQ ID NO: 5527 - DNA, 21 bp, Homo sapiens
aatgtctgatgtcggtacatt

SEQ ID NO: 5528 - RNA, 21 nt, RNAi-sense strand
ugucugaugucgguacauuuu

SEQ ID NO: 5529 - RNA, 21 nt, RNAi-antisense strand
aauguaccgacaucagacauu

SEQ ID NO: 5530 - DNA, 21 bp, Homo sapiens
aagtcactgcgacggatgcag

SEQ ID NO: 5531 - RNA, 21 nt, RNAi-sense strand
gucacugcgacggaugcaguu

SEQ ID NO: 5532 - RNA, 21 nt, RNAi-antisense strand
cugcauccgucgcagugacuu

SEQ ID NO: 5533 - DNA, 21 bp, Homo sapiens
aacagtgctaaagttgtctac

SEQ ID NO: 5534 - RNA, 21 nt, RNAi-sense strand
cagugcuaaaguugucuacuu

SEQ ID NO: 5535 - RNA, 21 nt, RNAi-antisense strand
guagacaacuuuagcacuguu

SEQ ID NO: 5536 - DNA, 21 bp, Homo sapiens
aagttgtctacagtattctac

SEQ ID NO: 5537 - RNA, 21 nt, RNAi-sense strand
guugucuacaguauucuacuu

SEQ ID NO: 5538 - RNA, 21 nt, RNAi-antisense strand
guagaauacuguagacaacuu

SEQ ID NO: 5539 - DNA, 21 bp, Homo sapiens
aaacaggtattatcaagacag

SEQ ID NO: 5540 - RNA, 21 nt, RNAi-sense strand
acagguauuaucaagacaguu

SEQ ID NO: 5541 - RNA, 21 nt, RNAi-antisense strand
cugucuugauaauaccuguuu

SEQ ID NO: 5542 - DNA, 21 bp, Homo sapiens
aacaggtattatcaagacagc

SEQ ID NO: 5543 - RNA, 21 nt, RNAi-sense strand
cagguauuaucaagacagcuu

SEQ ID NO: 5544 - RNA, 21 nt, RNAi-antisense strand
gcugucuugauaauaccuguu

SEQ ID NO: 5545 - DNA, 21 bp, Homo sapiens
aagacagctttgctcaacatg

SEQ ID NO: 5546 - RNA, 21 nt, RNAi-sense strand
gacagcuuugcucaacauguu

SEQ ID NO: 5547 - RNA, 21 nt, RNAi-antisense strand
cauguugagcaaagcugucuu

SEQ ID NO: 5548 - DNA, 21 bp, Homo sapiens
aagtggtgattcaagccaagg

SEQ ID NO: 5549 - RNA, 21 nt, RNAi-sense strand
guggugauucaagccaagguu

SEQ ID NO: 5550 - RNA, 21 nt, RNAi-antisense strand
ccuuggcuugaaucaccacuu

SEQ ID NO: 5551 - DNA, 21 bp, Homo sapiens
aacatcacactgactgatgtc

SEQ ID NO: 5552 - RNA, 21 nt, RNAi-sense strand
caucacacugacugaugucuu

SEQ ID NO: 5553 - RNA, 21 nt, RNAi-antisense strand
gacaucagucagugugauguu

SEQ ID NO: 5554 - DNA, 21 bp, Homo sapiens
aaactcctgaatcttctccac

SEQ ID NO: 5555 - RNA, 21 nt, RNAi-sense strand
acuccugaaucuucuccacuu

SEQ ID NO: 5556 - RNA, 21 nt, RNAi-antisense strand
guggagaagauucaggaguuu

SEQ ID NO: 5557 - DNA, 21 bp, Homo sapiens
aactcctgaatcttctccacc

SEQ ID NO: 5558 - RNA, 21 nt, RNAi-sense strand
cuccugaaucuucuccaccuu

SEQ ID NO: 5559 - RNA, 21 nt, RNAi-antisense strand
gguggagaagauucaggaguu

SEQ ID NO: 5560 - DNA, 21 bp, Homo sapiens
aattggcagaatcaaagccag

SEQ ID NO: 5561 - RNA, 21 nt, RNAi-sense strand
uuggcagaaucaaagccaguu

SEQ ID NO: 5562 - RNA, 21 nt, RNAi-antisense strand
cuggcuuugauucugccaauu

SEQ ID NO: 5563 - DNA, 21 bp, Homo sapiens
aatcaaagccagcgacgctga

SEQ ID NO: 5564 - RNA, 21 nt, RNAi-sense strand
ucaaagccagcgacgcugauu

SEQ ID NO: 5565 - RNA, 21 nt, RNAi-antisense strand
ucagcgucgcuggcuuugauu

SEQ ID NO: 5566 - DNA, 21 bp, Homo sapiens
aaagccagcgacgctgatgtg

SEQ ID NO: 5567 - RNA, 21 nt, RNAi-sense strand
agccagcgacgcugauguguu

SEQ ID NO: 5568 - RNA, 21 nt, RNAi-antisense strand
cacaucagcgucgcuggcuuu

SEQ ID NO: 5569 - DNA, 21 bp, Homo sapiens
aagccagcgacgctgatgtgg

SEQ ID NO: 5570 - RNA, 21 nt, RNAi-sense strand
gccagcgacgcugaugugguu

SEQ ID NO: 5571 - RNA, 21 nt, RNAi-antisense strand
ccacaucagcgucgcuggcuu

SEQ ID NO: 5572 - DNA, 21 bp, Homo sapiens
aaatgctgaaattgagtacag

SEQ ID NO: 5573 - RNA, 21 nt, RNAi-sense strand
augcugaaauugaguacaguu

SEQ ID NO: 5574 - RNA, 21 nt, RNAi-antisense strand
cuguacucaauuucagcauuu

SEQ ID NO: 5575 - DNA, 21 bp, Homo sapiens
aatgctgaaattgagtacagc

SEQ ID NO: 5576 - RNA, 21 nt, RNAi-sense strand
ugcugaaauugaguacagcuu

SEQ ID NO: 5577 - RNA, 21 nt, RNAi-antisense strand
gcuguacucaauuucagcauu

SEQ ID NO: 5578 - DNA, 21 bp, Homo sapiens
aaattgagtacagcatcacag

SEQ ID NO: 5579 - RNA, 21 nt, RNAi-sense strand
auugaguacagcaucacaguu

SEQ ID NO: 5580 - RNA, 21 nt, RNAi-antisense strand
cugugaugcuguacucaauuu

SEQ ID NO: 5581 - DNA, 21 bp, Homo sapiens
aattgagtacagcatcacaga

SEQ ID NO: 5582 - RNA, 21 nt, RNAi-sense strand
uugaguacagcaucacagauu

SEQ ID NO: 5583 - RNA, 21 nt, RNAi-antisense strand
ucugugaugcuguacucaauu

SEQ ID NO: 5584 - DNA, 21 bp, Homo sapiens
aaagtggaagcctccaatcct

SEQ ID NO: 5585 - RNA, 21 nt, RNAi-sense strand
aguggaagccuccaauccuuu

SEQ ID NO: 5586 - RNA, 21 nt, RNAi-antisense strand
aggauuggaggcuuccacuuu

SEQ ID NO: 5587 - DNA, 21 bp, Homo sapiens
aagtggaagcctccaatcctt

SEQ ID NO: 5588 - RNA, 21 nt, RNAi-sense strand
guggaagccuccaauccuuuu

SEQ ID NO: 5589 - RNA, 21 nt, RNAi-antisense strand
aaggauuggaggcuuccacuu

SEQ ID NO: 5590 - DNA, 21 bp, Homo sapiens
aagcctccaatccttatgttg

SEQ ID NO: 5591 - RNA, 21 nt, RNAi-sense strand
gccuccaauccuuauguuguu

SEQ ID NO: 5592 - RNA, 21 nt, RNAi-antisense strand
caacauaaggauuggaggcuu

SEQ ID NO: 5593 - DNA, 21 bp, Homo sapiens
aatccttatgttgagccacga

SEQ ID NO: 5594 - RNA, 21 nt, RNAi-sense strand
uccuuauguugagccacgauu

SEQ ID NO: 5595 - RNA, 21 nt, RNAi-antisense strand
ucguggcucaacauaaggauu

SEQ ID NO: 5596 - DNA, 21 bp, Homo sapiens
aaagattcagccacggttaga

SEQ ID NO: 5597 - RNA, 21 nt, RNAi-sense strand
agauucagccacgguuagauu

SEQ ID NO: 5598 - RNA, 21 nt, RNAi-antisense strand
ucuaaccguggcugaaucuuu

SEQ ID NO: 5599 - DNA, 21 bp, Homo sapiens
aagattcagccacggttagaa

SEQ ID NO: 5600 - RNA, 21 nt, RNAi-sense strand
gauucagccacgguuagaauu

SEQ ID NO: 5601 - RNA, 21 nt, RNAi-antisense strand
uucuaaccguggcugaaucuu

SEQ ID NO: 5602 - DNA, 21 bp, Homo sapiens
aattgtggtggaggatgtaga

SEQ ID NO: 5603 - RNA, 21 nt, RNAi-sense strand
uugugguggaggauguagauu

SEQ ID NO: 5604 - RNA, 21 nt, RNAi-antisense strand
ucuacauccuccaccacaauu

SEQ ID NO: 5605 - DNA, 21 bp, Homo sapiens
aaactggcctacatcttacaa

SEQ ID NO: 5606 - RNA, 21 nt, RNAi-sense strand
acuggccuacaucuuacaauu

SEQ ID NO: 5607 - RNA, 21 nt, RNAi-antisense strand
uuguaagauguaggccaguuu

SEQ ID NO: 5608 - DNA, 21 bp, Homo sapiens
aactggcctacatcttacaaa

SEQ ID NO: 5609 - RNA, 21 nt, RNAi-sense strand
cuggccuacaucuuacaaauu

SEQ ID NO: 5610 - RNA, 21 nt, RNAi-antisense strand
uuuguaagauguaggccaguu

SEQ ID NO: 5611 - DNA, 21 bp, Homo sapiens
aaataagagaagatgctcaga

SEQ ID NO: 5612 - RNA, 21 nt, RNAi-sense strand
auaagagaagaugcucagauu

SEQ ID NO: 5613 - RNA, 21 nt, RNAi-antisense strand
ucugagcaucuucucuuauuu

SEQ ID NO: 5614 - DNA, 21 bp, Homo sapiens
aataagagaagatgctcagat

SEQ ID NO: 5615 - RNA, 21 nt, RNAi-sense strand
uaagagaagaugcucagauuu

SEQ ID NO: 5616 - RNA, 21 nt, RNAi-antisense strand
aucugagcaucuucucuuauu

SEQ ID NO: 5617 - DNA, 21 bp, Homo sapiens
aagagaagatgctcagataaa

SEQ ID NO: 5618 - RNA, 21 nt, RNAi-sense strand
gagaagaugcucagauaaauu

SEQ ID NO: 5619 - RNA, 21 nt, RNAi-antisense strand
uuuaucugagcaucuucucuu

SEQ ID NO: 5620 - DNA, 21 bp, Homo sapiens
aagatgctcagataaacacca

SEQ ID NO: 5621 - RNA, 21 nt, RNAi-sense strand
gaugcucagauaaacaccauu

SEQ ID NO: 5622 - RNA, 21 nt, RNAi-antisense strand
ugguguuuaucugagcaucuu

SEQ ID NO: 5623 - DNA, 21 bp, Homo sapiens
aaacaccacaataggctccgt

SEQ ID NO: 5624 - RNA, 21 nt, RNAi-sense strand
acaccacaauaggcuccguuu

SEQ ID NO: 5625 - RNA, 21 nt, RNAi-antisense strand
acggagccuauugugguguuu

SEQ ID NO: 5626 - DNA, 21 bp, Homo sapiens
aacaccacaataggctccgtc

SEQ ID NO: 5627 - RNA, 21 nt, RNAi-sense strand
caccacaauaggcuccgucuu

SEQ ID NO: 5628 - RNA, 21 nt, RNAi-antisense strand
gacggagccuauugugguguu

SEQ ID NO: 5629 - DNA, 21 bp, Homo sapiens
aagatccagatgctgccagga

SEQ ID NO: 5630 - RNA, 21 nt, RNAi-sense strand
gauccagaugcugccaggauu

SEQ ID NO: 5631 - RNA, 21 nt, RNAi-antisense strand
uccuggcagcaucuggaucuu

SEQ ID NO: 5632 - DNA, 21 bp, Homo sapiens
aatcctgtcaagtactctgta

SEQ ID NO: 5633 - RNA, 21 nt, RNAi-sense strand
uccugucaaguacucuguauu

SEQ ID NO: 5634 - RNA, 21 nt, RNAi-antisense strand
uacagaguacuugacaggauu

SEQ ID NO: 5635 - DNA, 21 bp, Homo sapiens
aagtactctgtagatcgacac

SEQ ID NO: 5636 - RNA, 21 nt, RNAi-sense strand
guacucuguagaucgacacuu

SEQ ID NO: 5637 - RNA, 21 nt, RNAi-antisense strand
gugucgaucuacagaguacuu

SEQ ID NO: 5638 - DNA, 21 bp, Homo sapiens
aacattgattctggaaatggt

SEQ ID NO: 5639 - RNA, 21 nt, RNAi-sense strand
cauugauucuggaaaugguuu

SEQ ID NO: 5640 - RNA, 21 nt, RNAi-antisense strand
accauuuccagaaucaauguu

SEQ ID NO: 5641 - DNA, 21 bp, Homo sapiens
aaacttcttgaccgagaaaca

SEQ ID NO: 5642 - RNA, 21 nt, RNAi-sense strand
acuucuugaccgagaaacauu

SEQ ID NO: 5643 - RNA, 21 nt, RNAi-antisense strand
uguuucucggucaagaaguuu

SEQ ID NO: 5644 - DNA, 21 bp, Homo sapiens
aacttcttgaccgagaaacac

SEQ ID NO: 5645 - RNA, 21 nt, RNAi-sense strand
cuucuugaccgagaaacacuu

SEQ ID NO: 5646 - RNA, 21 nt, RNAi-antisense strand
guguuucucggucaagaaguu

SEQ ID NO: 5647 - DNA, 21 bp, Homo sapiens
aaacactgctatggcacaaca

SEQ ID NO: 5648 - RNA, 21 nt, RNAi-sense strand
acacugcuauggcacaacauu

SEQ ID NO: 5649 - RNA, 21 nt, RNAi-antisense strand
uguugugccauagcaguguuu

SEQ ID NO: 5650 - DNA, 21 bp, Homo sapiens
aacactgctatggcacaacat

SEQ ID NO: 5651 - RNA, 21 nt, RNAi-sense strand
cacugcuauggcacaacauuu

SEQ ID NO: 5652 - RNA, 21 nt, RNAi-antisense strand
auguugugccauagcaguguu

SEQ ID NO: 5653 - DNA, 21 bp, Homo sapiens
aacattacagtgatagcaaca

SEQ ID NO: 5654 - RNA, 21 nt, RNAi-sense strand
cauuacagugauagcaacauu

SEQ ID NO: 5655 - RNA, 21 nt, RNAi-antisense strand
uguugcuaucacuguaauguu

SEQ ID NO: 5656 - DNA, 21 bp, Homo sapiens
aatccaaagcaaagtagtcga

SEQ ID NO: 5657 - RNA, 21 nt, RNAi-sense strand
uccaaagcaaaguagucgauu

SEQ ID NO: 5658 - RNA, 21 nt, RNAi-antisense strand
ucgacuacuuugcuuuggauu

SEQ ID NO: 5659 - DNA, 21 bp, Homo sapiens
aaagcaaagtagtcgagtacc

SEQ ID NO: 5660 - RNA, 21 nt, RNAi-sense strand
agcaaaguagucgaguaccuu

SEQ ID NO: 5661 - RNA, 21 nt, RNAi-antisense strand
gguacucgacuacuuugcuuu

SEQ ID NO: 5662 - DNA, 21 bp, Homo sapiens
aagcaaagtagtcgagtacct

SEQ ID NO: 5663 - RNA, 21 nt, RNAi-sense strand
gcaaaguagucgaguaccuuu

SEQ ID NO: 5664 - RNA, 21 nt, RNAi-antisense strand
agguacucgacuacuuugcuu

SEQ ID NO: 5665 - DNA, 21 bp, Homo sapiens
aaagtagtcgagtacctctat

SEQ ID NO: 5666 - RNA, 21 nt, RNAi-sense strand
aguagucgaguaccucuauuu

SEQ ID NO: 5667 - RNA, 21 nt, RNAi-antisense strand
auagagguacucgacuacuuu

SEQ ID NO: 5668 - DNA, 21 bp, Homo sapiens
aagtagtcgagtacctctata

SEQ ID NO: 5669 - RNA, 21 nt, RNAi-sense strand
guagucgaguaccucuauauu

SEQ ID NO: 5670 - RNA, 21 nt, RNAi-antisense strand
uauagagguacucgacuacuu

SEQ ID NO: 5671 - DNA, 21 bp, Homo sapiens
aaagttctagatgtcaatgac

SEQ ID NO: 5672 - RNA, 21 nt, RNAi-sense strand
aguucuagaugucaaugacuu

SEQ ID NO: 5673 - RNA, 21 nt, RNAi-antisense strand
gucauugacaucuagaacuuu

SEQ ID NO: 5674 - DNA, 21 bp, Homo sapiens
aagttctagatgtcaatgaca

SEQ ID NO: 5675 - RNA, 21 nt, RNAi-sense strand
guucuagaugucaaugacauu

SEQ ID NO: 5676 - RNA, 21 nt, RNAi-antisense strand
ugucauugacaucuagaacuu

SEQ ID NO: 5677 - DNA, 21 bp, Homo sapiens
aaagcaaaggcagatcagttg

SEQ ID NO: 5678 - RNA, 21 nt, RNAi-sense strand
agcaaaggcagaucaguuguu

SEQ ID NO: 5679 - RNA, 21 nt, RNAi-antisense strand
caacugaucugccuuugcuuu

SEQ ID NO: 5680 - DNA, 21 bp, Homo sapiens
aagcaaaggcagatcagttga

SEQ ID NO: 5681 - RNA, 21 nt, RNAi-sense strand
gcaaaggcagaucaguugauu

SEQ ID NO: 5682 - RNA, 21 nt, RNAi-antisense strand
ucaacugaucugccuuugcuu

SEQ ID NO: 5683 - DNA, 21 bp, Homo sapiens
aaaggcagatcagttgattca

SEQ ID NO: 5684 - RNA, 21 nt, RNAi-sense strand
aggcagaucaguugauucauu

SEQ ID NO: 5685 - RNA, 21 nt, RNAi-antisense strand
ugaaucaacugaucugccuuu

SEQ ID NO: 5686 - DNA, 21 bp, Homo sapiens
aaggcagatcagttgattcag

SEQ ID NO: 5687 - RNA, 21 nt, RNAi-sense strand
ggcagaucaguugauucaguu

SEQ ID NO: 5688 - RNA, 21 nt, RNAi-antisense strand
cugaaucaacugaucugccuu

SEQ ID NO: 5689 - DNA, 21 bp, Homo sapiens
aagcagccagtggctcaaact

SEQ ID NO: 5690 - RNA, 21 nt, RNAi-sense strand
gcagccaguggcucaaacuuu

SEQ ID NO: 5691 - RNA, 21 nt, RNAi-antisense strand
aguuugagccacuggcugcuu

SEQ ID NO: 5692 - DNA, 21 bp, Homo sapiens
aactttaccattcaagacaac

SEQ ID NO: 5693 - RNA, 21 nt, RNAi-sense strand
cuuuaccauucaagacaacuu

SEQ ID NO: 5694 - RNA, 21 nt, RNAi-antisense strand
guugucuugaaugguaaaguu

SEQ ID NO: 5695 - DNA, 21 bp, Homo sapiens
aagacaacaaagacaacacgg

SEQ ID NO: 5696 - RNA, 21 nt, RNAi-sense strand
gacaacaaagacaacacgguu

SEQ ID NO: 5697 - RNA, 21 nt, RNAi-antisense strand
ccguguugucuuuguugucuu

SEQ ID NO: 5698 - DNA, 21 bp, Homo sapiens
aaatggctataatagacacga

SEQ ID NO: 5699 - RNA, 21 nt, RNAi-sense strand
auggcuauaauagacacgauu

SEQ ID NO: 5700 - RNA, 21 nt, RNAi-antisense strand
ucgugucuauuauagccauuu

SEQ ID NO: 5701 - DNA, 21 bp, Homo sapiens
aatggctataatagacacgag

SEQ ID NO: 5702 - RNA, 21 nt, RNAi-sense strand
uggcuauaauagacacgaguu

SEQ ID NO: 5703 - RNA, 21 nt, RNAi-antisense strand
cucgugucuauuauagccauu

SEQ ID NO: 5704 - DNA, 21 bp, Homo sapiens
aatagacacgagatgagcacc

SEQ ID NO: 5705 - RNA, 21 nt, RNAi-sense strand
uagacacgagaugagcaccuu

SEQ ID NO: 5706 - RNA, 21 nt, RNAi-antisense strand
ggugcucaucucgugucuauu

SEQ ID NO: 5707 - DNA, 21 bp, Homo sapiens
aacatgcaatcctgccatgcg

SEQ ID NO: 5708 - RNA, 21 nt, RNAi-sense strand
caugcaauccugccaugcguu

SEQ ID NO: 5709 - RNA, 21 nt, RNAi-antisense strand
cgcauggcaggauugcauguu

SEQ ID NO: 5710 - DNA, 21 bp, Homo sapiens
aaagagcctttgatcatttcc

SEQ ID NO: 5711 - RNA, 21 nt, RNAi-sense strand
agagccuuugaucauuuccuu

SEQ ID NO: 5712 - RNA, 21 nt, RNAi-antisense strand
ggaaaugaucaaaggcucuuu

SEQ ID NO: 5713 - DNA, 21 bp, Homo sapiens
aagagcctttgatcatttcca

SEQ ID NO: 5714 - RNA, 21 nt, RNAi-sense strand
gagccuuugaucauuuccauu

SEQ ID NO: 5715 - RNA, 21 nt, RNAi-antisense strand
uggaaaugaucaaaggcucuu

SEQ ID NO: 5716 - DNA, 21 bp, Homo sapiens
aaagaggacatcagagataac

SEQ ID NO: 5717 - RNA, 21 nt, RNAi-sense strand
agaggacaucagagauaacuu

SEQ ID NO: 5718 - RNA, 21 nt, RNAi-antisense strand
guuaucucugauguccucuuu

SEQ ID NO: 5719 - DNA, 21 bp, Homo sapiens
aagaggacatcagagataaca

SEQ ID NO: 5720 - RNA, 21 nt, RNAi-sense strand
gaggacaucagagauaacauu

SEQ ID NO: 5721 - RNA, 21 nt, RNAi-antisense strand
uguuaucucugauguccucuu

SEQ ID NO: 5722 - DNA, 21 bp, Homo sapiens
aacattgtcagttacaacgac

SEQ ID NO: 5723 - RNA, 21 nt, RNAi-sense strand
cauugucaguuacaacgacuu

SEQ ID NO: 5724 - RNA, 21 nt, RNAi-antisense strand
gucguuguaacugacaauguu

SEQ ID NO: 5725 - DNA, 21 bp, Homo sapiens
aacgacgaaggtggtggagag

SEQ ID NO: 5726 - RNA, 21 nt, RNAi-sense strand
cgacgaaggugguggagaguu

SEQ ID NO: 5727 - RNA, 21 nt, RNAi-antisense strand
cucuccaccaccuucgucguu

SEQ ID NO: 5728 - DNA, 21 bp, Homo sapiens
aaggtggtggagaggaggaca

SEQ ID NO: 5729 - RNA, 21 nt, RNAi-sense strand
ggugguggagaggaggacauu

SEQ ID NO: 5730 - RNA, 21 nt, RNAi-antisense strand
uguccuccucuccaccaccuu

SEQ ID NO: 5731 - DNA, 21 bp, Homo sapiens
aatcctgaagccatagaggac

SEQ ID NO: 5732 - RNA, 21 nt, RNAi-sense strand
uccugaagccauagaggacuu

SEQ ID NO: 5733 - RNA, 21 nt, RNAi-antisense strand
guccucuauggcuucaggauu

SEQ ID NO: 5734 - DNA, 21 bp, Homo sapiens
aagccatagaggacaacaaat

SEQ ID NO: 5735 - RNA, 21 nt, RNAi-sense strand
gccauagaggacaacaaauuu

SEQ ID NO: 5736 - RNA, 21 nt, RNAi-antisense strand
auuuguuguccucuauggcuu

SEQ ID NO: 5737 - DNA, 21 bp, Homo sapiens
aacagctcgcgacaacaccga

SEQ ID NO: 5738 - RNA, 21 nt, RNAi-sense strand
cagcucgcgacaacaccgauu

SEQ ID NO: 5739 - RNA, 21 nt, RNAi-antisense strand
ucgguguugucgcgagcuguu

SEQ ID NO: 5740 - DNA, 21 bp, Homo sapiens
aacaccgatgtcagagatttc

SEQ ID NO: 5741 - RNA, 21 nt, RNAi-sense strand
caccgaugucagagauuucuu

SEQ ID NO: 5742 - RNA, 21 nt, RNAi-antisense strand
gaaaucucugacaucgguguu

SEQ ID NO: 5743 - DNA, 21 bp, Homo sapiens
aagactatgattaccttagtg

SEQ ID NO: 5744 - RNA, 21 nt, RNAi-sense strand
gacuaugauuaccuuaguguu

SEQ ID NO: 5745 - RNA, 21 nt, RNAi-antisense strand
cacuaagguaaucauagucuu

SEQ ID NO: 5746 - DNA, 21 bp, Homo sapiens
aaagcttgcagatatgtatgg

SEQ ID NO: 5747 - RNA, 21 nt, RNAi-sense strand
agcuugcagauauguaugguu

SEQ ID NO: 5748 - RNA, 21 nt, RNAi-antisense strand
ccauacauaucugcaagcuuu

SEQ ID NO: 5749 - DNA, 21 bp, Homo sapiens
aagcttgcagatatgtatgga

SEQ ID NO: 5750 - RNA, 21 nt, RNAi-sense strand
gcuugcagauauguauggauu

SEQ ID NO: 5751 - RNA, 21 nt, RNAi-antisense strand
uccauacauaucugcaagcuu

SEQ ID NO: 5752 - DNA, 21 bp, Homo sapiens
aaagactcctaatctgttgcc

SEQ ID NO: 5753 - RNA, 21 nt, RNAi-sense strand
agacuccuaaucuguugccuu

SEQ ID NO: 5754 - RNA, 21 nt, RNAi-antisense strand
ggcaacagauuaggagucuuu

SEQ ID NO: 5755 - DNA, 21 bp, Homo sapiens
aagactcctaatctgttgcct

SEQ ID NO: 5756 - RNA, 21 nt, RNAi-sense strand
gacuccuaaucuguugccuuu

SEQ ID NO: 5757 - RNA, 21 nt, RNAi-antisense strand
aggcaacagauuaggagucuu

SEQ ID NO: 5758 - DNA, 21 bp, Homo sapiens
aatacgacactgaaatatgtg

SEQ ID NO: 5759 - RNA, 21 nt, RNAi-sense strand
uacgacacugaaauauguguu

SEQ ID NO: 5760 - RNA, 21 nt, RNAi-antisense strand
cacauauuucagugucguauu

SEQ ID NO: 5761 - DNA, 21 bp, Homo sapiens
aatatgtgaagtggctatttc

SEQ ID NO: 5762 - RNA, 21 nt, RNAi-sense strand
uaugugaaguggcuauuucuu

SEQ ID NO: 5763 - RNA, 21 nt, RNAi-antisense strand
gaaauagccacuucacauauu

SEQ ID NO: 5764 - DNA, 21 bp, Homo sapiens
aaagccaatggctgcagtccg

SEQ ID NO: 5765 - RNA, 21 nt, RNAi-sense strand
agccaauggcugcaguccguu

SEQ ID NO: 5766 - RNA, 21 nt, RNAi-antisense strand
cggacugcagccauuggcuuu

SEQ ID NO: 5767 - DNA, 21 bp, Homo sapiens
aagccaatggctgcagtccgt

SEQ ID NO: 5768 - RNA, 21 nt, RNAi-sense strand
gccaauggcugcaguccguuu

SEQ ID NO: 5769 - RNA, 21 nt, RNAi-antisense strand
acggacugcagccauuggcuu

SEQ ID NO: 5770 - DNA, 21 bp, Homo sapiens
aatggctgcagtccgtgtgga

SEQ ID NO: 5771 - RNA, 21 nt, RNAi-sense strand
uggcugcaguccguguggauu

SEQ ID NO: 5772 - RNA, 21 nt, RNAi-antisense strand
uccacacggacugcagccauu

SEQ ID NO: 5773 - DNA, 21 bp, Homo sapiens
aacagtatttccacttgttct

SEQ ID NO: 5774 - RNA, 21 nt, RNAi-sense strand
caguauuuccacuuguucuuu

SEQ ID NO: 5775 - RNA, 21 nt, RNAi-antisense strand
agaacaaguggaaauacuguu

SEQ ID NO: 5776 - DNA, 21 bp, Homo sapiens
aactgtacatttcacaggcta

SEQ ID NO: 5777 - RNA, 21 nt, RNAi-sense strand
cuguacauuucacaggcuauu

SEQ ID NO: 5778 - RNA, 21 nt, RNAi-antisense strand
uagccugugaaauguacaguu

SEQ ID NO: 5779 - DNA, 21 bp, Homo sapiens
aaaggactgtgctttaaagat

SEQ ID NO: 5780 - RNA, 21 nt, RNAi-sense strand
aggacugugcuuuaaagauuu

SEQ ID NO: 5781 - RNA, 21 nt, RNAi-antisense strand
aucuuuaaagcacaguccuuu

SEQ ID NO: 5782 - DNA, 21 bp, Homo sapiens
aaggactgtgctttaaagata

SEQ ID NO: 5783 - RNA, 21 nt, RNAi-sense strand
ggacugugcuuuaaagauauu

SEQ ID NO: 5784 - RNA, 21 nt, RNAi-antisense strand
uaucuuuaaagcacaguccuu

SEQ ID NO: 5785 - DNA, 21 bp, Homo sapiens
aagaactttctctgccatcaa

SEQ ID NO: 5786 - RNA, 21 nt, RNAi-sense strand
gaacuuucucugccaucaauu

SEQ ID NO: 5787 - RNA, 21 nt, RNAi-antisense strand
uugauggcagagaaaguucuu

SEQ ID NO: 5788 - DNA, 21 bp, Homo sapiens
aactttctctgccatcaacta

SEQ ID NO: 5789 - RNA, 21 nt, RNAi-sense strand
cuuucucugccaucaacuauu

SEQ ID NO: 5790 - RNA, 21 nt, RNAi-antisense strand
uaguugauggcagagaaaguu

SEQ ID NO: 5791 - DNA, 21 bp, Homo sapiens
aaagcaaccacaaacctagta

SEQ ID NO: 5792 - RNA, 21 nt, RNAi-sense strand
agcaaccacaaaccuaguauu

SEQ ID NO: 5793 - RNA, 21 nt, RNAi-antisense strand
uacuagguuugugguugcuuu

SEQ ID NO: 5794 - DNA, 21 bp, Homo sapiens
aagcaaccacaaacctagtac

SEQ ID NO: 5795 - RNA, 21 nt, RNAi-sense strand
gcaaccacaaaccuaguacuu

SEQ ID NO: 5796 - RNA, 21 nt, RNAi-antisense strand
guacuagguuugugguugcuu

SEQ ID NO: 5797 - DNA, 21 bp, Homo sapiens
aaccacaaacctagtacgact

SEQ ID NO: 5798 - RNA, 21 nt, RNAi-sense strand
ccacaaaccuaguacgacuuu

SEQ ID NO: 5799 - RNA, 21 nt, RNAi-antisense strand
agucguacuagguuugugguu

SEQ ID NO: 5800 - DNA, 21 bp, Homo sapiens
aaacctagtacgacttcattc

SEQ ID NO: 5801 - RNA, 21 nt, RNAi-sense strand
accuaguacgacuucauucuu

SEQ ID NO: 5802 - RNA, 21 nt, RNAi-antisense strand
gaaugaagucguacuagguuu

SEQ ID NO: 5803 - DNA, 21 bp, Homo sapiens
aacctagtacgacttcattcc

SEQ ID NO: 5804 - RNA, 21 nt, RNAi-sense strand
ccuaguacgacuucauuccuu

SEQ ID NO: 5805 - RNA, 21 nt, RNAi-antisense strand
ggaaugaagucguacuagguu

SEQ ID NO: 5806 - DNA, 21 bp, Homo sapiens
aaagtttgcctttgtaccata

SEQ ID NO: 5807 - RNA, 21 nt, RNAi-sense strand
aguuugccuuuguaccauauu

SEQ ID NO: 5808 - RNA, 21 nt, RNAi-antisense strand
uaugguacaaaggcaaacuuu

SEQ ID NO: 5809 - DNA, 21 bp, Homo sapiens
aagtttgcctttgtaccatat

SEQ ID NO: 5810 - RNA, 21 nt, RNAi-sense strand
guuugccuuuguaccauauuu

SEQ ID NO: 5811 - RNA, 21 nt, RNAi-antisense strand
auaugguacaaaggcaaacuu

SEQ ID NO: 5812 - DNA, 21 bp, Homo sapiens
aattctttcagctatcagtag

SEQ ID NO: 5813 - RNA, 21 nt, RNAi-sense strand
uucuuucagcuaucaguaguu

SEQ ID NO: 5814 - RNA, 21 nt, RNAi-antisense strand
cuacugauagcugaaagaauu

SEQ ID NO: 5815 - DNA, 21 bp, Homo sapiens
aacttcttgtctatagttgtc

SEQ ID NO: 5816 - RNA, 21 nt, RNAi-sense strand
cuucuugucuauaguugucuu

SEQ ID NO: 5817 - RNA, 21 nt, RNAi-antisense strand
gacaacuauagacaagaaguu

SEQ ID NO: 5818 - DNA, 21 bp, Homo sapiens
aaagtagcagtgtgaagtaca

SEQ ID NO: 5819 - RNA, 21 nt, RNAi-sense strand
aguagcagugugaaguacauu

SEQ ID NO: 5820 - RNA, 21 nt, RNAi-antisense strand
uguacuucacacugcuacuuu

SEQ ID NO: 5821 - DNA, 21 bp, Homo sapiens
aagtagcagtgtgaagtacaa

SEQ ID NO: 5822 - RNA, 21 nt, RNAi-sense strand
guagcagugugaaguacaauu

SEQ ID NO: 5823 - RNA, 21 nt, RNAi-antisense strand
uuguacuucacacugcuacuu

SEQ ID NO: 5824 - DNA, 21 bp, Homo sapiens
aaacttaaatctcactctagg

SEQ ID NO: 5825 - RNA, 21 nt, RNAi-sense strand
acuuaaaucucacucuagguu

SEQ ID NO: 5826 - RNA, 21 nt, RNAi-antisense strand
ccuagagugagauuuaaguuu

SEQ ID NO: 5827 - DNA, 21 bp, Homo sapiens
aacttaaatctcactctagga

SEQ ID NO: 5828 - RNA, 21 nt, RNAi-sense strand
cuuaaaucucacucuaggauu

SEQ ID NO: 5829 - RNA, 21 nt, RNAi-antisense strand
uccuagagugagauuuaaguu

SEQ ID NO: 5830 - DNA, 21 bp, Homo sapiens
aaatctcactctaggagttca

SEQ ID NO: 5831 - RNA, 21 nt, RNAi-sense strand
aucucacucuaggaguucauu

SEQ ID NO: 5832 - RNA, 21 nt, RNAi-antisense strand
ugaacuccuagagugagauuu

SEQ ID NO: 5833 - DNA, 21 bp, Homo sapiens
aatctcactctaggagttcag

SEQ ID NO: 5834 - RNA, 21 nt, RNAi-sense strand
ucucacucuaggaguucaguu

SEQ ID NO: 5835 - RNA, 21 nt, RNAi-antisense strand
cugaacuccuagagugagauu

SEQ ID NO: 5836 - DNA, 21 bp, Homo sapiens
aacctacatattccatgtttg

SEQ ID NO: 5837 - RNA, 21 nt, RNAi-sense strand
ccuacauauuccauguuuguu

SEQ ID NO: 5838 - RNA, 21 nt, RNAi-antisense strand
caaacauggaauauguagguu

SEQ ID NO: 5839 - DNA, 21 bp, Homo sapiens
aactttgctttcatgaccatc

SEQ ID NO: 5840 - RNA, 21 nt, RNAi-sense strand
cuuugcuuucaugaccaucuu

SEQ ID NO: 5841 - RNA, 21 nt, RNAi-antisense strand
gauggucaugaaagcaaaguu

SEQ ID NO: 5842 - DNA, 21 bp, Homo sapiens
aatgatctcaaactatgacag

SEQ ID NO: 5843 - RNA, 21 nt, RNAi-sense strand
ugaucucaaacuaugacaguu

SEQ ID NO: 5844 - RNA, 21 nt, RNAi-antisense strand
cugucauaguuugagaucauu

SEQ ID NO: 5845 - DNA, 21 bp, Homo sapiens
aactgaactgaactaatcctt

SEQ ID NO: 5846 - RNA, 21 nt, RNAi-sense strand
cugaacugaacuaauccuuuu

SEQ ID NO: 5847 - RNA, 21 nt, RNAi-antisense strand
aaggauuaguucaguucaguu

SEQ ID NO: 5848 - DNA, 21 bp, Homo sapiens
aactgaactaatccttctggc

SEQ ID NO: 5849 - RNA, 21 nt, RNAi-sense strand
cugaacuaauccuucuggcuu

SEQ ID NO: 5850 - RNA, 21 nt, RNAi-antisense strand
gccagaaggauuaguucaguu

SEQ ID NO: 5851 - DNA, 21 bp, Homo sapiens
aactaatccttctggcagatt

SEQ ID NO: 5852 - RNA, 21 nt, RNAi-sense strand
cuaauccuucuggcagauuuu

SEQ ID NO: 5853 - RNA, 21 nt, RNAi-antisense strand
aaucugccagaaggauuaguu

SEQ ID NO: 5854 - DNA, 21 bp, Homo sapiens
aatccttctggcagattcaaa

SEQ ID NO: 5855 - RNA, 21 nt, RNAi-sense strand
uccuucuggcagauucaaauu

SEQ ID NO: 5856 - RNA, 21 nt, RNAi-antisense strand
uuugaaucugccagaaggauu

SEQ ID NO: 5857 - DNA, 21 bp, Homo sapiens
aaatcgtttatttcacacgct

SEQ ID NO: 5858 - RNA, 21 nt, RNAi-sense strand
aucguuuauuucacacgcuuu

SEQ ID NO: 5859 - RNA, 21 nt, RNAi-antisense strand
agcgugugaaauaaacgauuu

SEQ ID NO: 5860 - DNA, 21 bp, Homo sapiens
aatcgtttatttcacacgctg

SEQ ID NO: 5861 - RNA, 21 nt, RNAi-sense strand
ucguuuauuucacacgcuguu

SEQ ID NO: 5862 - RNA, 21 nt, RNAi-antisense strand
cagcgugugaaauaaacgauu

SEQ ID NO: 5863 - DNA, 21 bp, Homo sapiens
aatcttaccttgtgcagtcat

SEQ ID NO: 5864 - RNA, 21 nt, RNAi-sense strand
ucuuaccuugugcagucauuu

SEQ ID NO: 5865 - RNA, 21 nt, RNAi-antisense strand
augacugcacaagguaagauu

SEQ ID NO: 5866 - DNA, 21 bp, Homo sapiens
aaattccagcgtactataatg

SEQ ID NO: 5867 - RNA, 21 nt, RNAi-sense strand
auuccagcguacuauaauguu

SEQ ID NO: 5868 - RNA, 21 nt, RNAi-antisense strand
cauuauaguacgcuggaauuu

SEQ ID NO: 5869 - DNA, 21 bp, Homo sapiens
aattccagcgtactataatga

SEQ ID NO: 5870 - RNA, 21 nt, RNAi-sense strand
uuccagcguacuauaaugauu

SEQ ID NO: 5871 - RNA, 21 nt, RNAi-antisense strand
ucauuauaguacgcuggaauu

SEQ ID NO: 5872 - DNA, 21 bp, Homo sapiens
aaagacaggctctgtatatat

SEQ ID NO: 5873 - RNA, 21 nt, RNAi-sense strand
agacaggcucuguauauauuu

SEQ ID NO: 5874 - RNA, 21 nt, RNAi-antisense strand
auauauacagagccugucuuu

SEQ ID NO: 5875 - DNA, 21 bp, Homo sapiens
aagacaggctctgtatatata

SEQ ID NO: 5876 - RNA, 21 nt, RNAi-sense strand
gacaggcucuguauauauauu

SEQ ID NO: 5877 - RNA, 21 nt, RNAi-antisense strand
uauauauacagagccugucuu

SEQ ID NO: 5878 - DNA, 21 bp, Homo sapiens
aagaatatgctgacttcactt

SEQ ID NO: 5879 - RNA, 21 nt, RNAi-sense strand
gaauaugcugacuucacuuuu

SEQ ID NO: 5880 - RNA, 21 nt, RNAi-antisense strand
aagugaagucagcauauucuu

SEQ ID NO: 5881 - DNA, 21 bp, Homo sapiens
cattcacttgcaaatcagtgt

SEQ ID NO: 5882 - RNA, 21 nt, RNAi-sense strand
uucacuugcaaaucaguguuu

SEQ ID NO: 5883 - RNA, 21 nt, RNAi-antisense strand
acacugauuugcaagugaauu

SEQ ID NO: 5884 - DNA, 21 bp, Homo sapiens
cacttgcaaatcagtgtgtgc

SEQ ID NO: 5885 - RNA, 21 nt, RNAi-sense strand
cuugcaaaucagugugugcuu

SEQ ID NO: 5886 - RNA, 21 nt, RNAi-antisense strand
gcacacacugauuugcaaguu

SEQ ID NO: 5887 - DNA, 21 bp, Homo sapiens
caagagctgcagtttcagccg

SEQ ID NO: 5888 - RNA, 21 nt, RNAi-sense strand
agagcugcaguuucagccguu

SEQ ID NO: 5889 - RNA, 21 nt, RNAi-antisense strand
cggcugaaacugcagcucuuu

SEQ ID NO: 5890 - DNA, 21 bp, Homo sapiens
cagtttcagccgcgacagcaa

SEQ ID NO: 5891 - RNA, 21 nt, RNAi-sense strand
guuucagccgcgacagcaauu

SEQ ID NO: 5892 - RNA, 21 nt, RNAi-antisense strand
uugcugucgcggcugaaacuu

SEQ ID NO: 5893 - DNA, 21 bp, Homo sapiens
caggaaggcgagcagagatat

SEQ ID NO: 5894 - RNA, 21 nt, RNAi-sense strand
ggaaggcgagcagagauauuu

SEQ ID NO: 5895 - RNA, 21 nt, RNAi-antisense strand
auaucucugcucgccuuccuu

SEQ ID NO: 5896 - DNA, 21 bp, Homo sapiens
cagagatatcctctgagagcc

SEQ ID NO: 5897 - RNA, 21 nt, RNAi-sense strand
gagauauccucugagagccuu

SEQ ID NO: 5898 - RNA, 21 nt, RNAi-antisense strand
ggcucucagaggauaucucuu

SEQ ID NO: 5899 - DNA, 21 bp, Homo sapiens
caagcaaagaacattaaggaa

SEQ ID NO: 5900 - RNA, 21 nt, RNAi-sense strand
agcaaagaacauuaaggaauu

SEQ ID NO: 5901 - RNA, 21 nt, RNAi-antisense strand
uuccuuaauguucuuugcuuu

SEQ ID NO: 5902 - DNA, 21 bp, Homo sapiens
caaagaacattaaggaaggaa

SEQ ID NO: 5903 - RNA, 21 nt, RNAi-sense strand
aagaacauuaaggaaggaauu

SEQ ID NO: 5904 - RNA, 21 nt, RNAi-antisense strand
uuccuuccuuaauguucuuuu

SEQ ID NO: 5905 - DNA, 21 bp, Homo sapiens
cattaaggaaggaaggaggaa

SEQ ID NO: 5906 - RNA, 21 nt, RNAi-sense strand
uuaaggaaggaaggaggaauu

SEQ ID NO: 5907 - RNA, 21 nt, RNAi-antisense strand
uuccuccuuccuuccuuaauu

SEQ ID NO: 5908 - DNA, 21 bp, Homo sapiens
cactcactacgcacagactcg

SEQ ID NO: 5909 - RNA, 21 nt, RNAi-sense strand
cucacuacgcacagacucguu

SEQ ID NO: 5910 - RNA, 21 nt, RNAi-antisense strand
cgagucugugcguagugaguu

SEQ ID NO: 5911 - DNA, 21 bp, Homo sapiens
cactacgcacagactcgacgg

SEQ ID NO: 5912 - RNA, 21 nt, RNAi-sense strand
cuacgcacagacucgacgguu

SEQ ID NO: 5913 - RNA, 21 nt, RNAi-antisense strand
ccgucgagucugugcguaguu

SEQ ID NO: 5914 - DNA, 21 bp, Homo sapiens
cacagactcgacggtgccatc

SEQ ID NO: 5915 - RNA, 21 nt, RNAi-sense strand
cagacucgacggugccaucuu

SEQ ID NO: 5916 - RNA, 21 nt, RNAi-antisense strand
gauggcaccgucgagucuguu

SEQ ID NO: 5917 - DNA, 21 bp, Homo sapiens
cagactcgacggtgccatcag

SEQ ID NO: 5918 - RNA, 21 nt, RNAi-sense strand
gacucgacggugccaucaguu

SEQ ID NO: 5919 - RNA, 21 nt, RNAi-antisense strand
cugauggcaccgucgagucuu

SEQ ID NO: 5920 - DNA, 21 bp, Homo sapiens
catcagcatgagaacttaccg

SEQ ID NO: 5921 - RNA, 21 nt, RNAi-sense strand
ucagcaugagaacuuaccguu

SEQ ID NO: 5922 - RNA, 21 nt, RNAi-antisense strand
cgguaaguucucaugcugauu

SEQ ID NO: 5923 - DNA, 21 bp, Homo sapiens
cagcatgagaacttaccgcta

SEQ ID NO: 5924 - RNA, 21 nt, RNAi-sense strand
gcaugagaacuuaccgcuauu

SEQ ID NO: 5925 - RNA, 21 nt, RNAi-antisense strand
uagcgguaaguucucaugcuu

SEQ ID NO: 5926 - DNA, 21 bp, Homo sapiens
catgagaacttaccgctactt

SEQ ID NO: 5927 - RNA, 21 nt, RNAi-sense strand
ugagaacuuaccgcuacuuuu

SEQ ID NO: 5928 - RNA, 21 nt, RNAi-antisense strand
aaguagcgguaaguucucauu

SEQ ID NO: 5929 - DNA, 21 bp, Homo sapiens
caactctctcaactccactat

SEQ ID NO: 5930 - RNA, 21 nt, RNAi-sense strand
acucucucaacuccacuauuu

SEQ ID NO: 5931 - RNA, 21 nt, RNAi-antisense strand
auaguggaguugagagaguuu

SEQ ID NO: 5932 - DNA, 21 bp, Homo sapiens
caactccactatcaaagagga

SEQ ID NO: 5933 - RNA, 21 nt, RNAi-sense strand
acuccacuaucaaagaggauu

SEQ ID NO: 5934 - RNA, 21 nt, RNAi-antisense strand
uccucuuugauaguggaguuu

SEQ ID NO: 5935 - DNA, 21 bp, Homo sapiens
cactatcaaagaggactagtg

SEQ ID NO: 5936 - RNA, 21 nt, RNAi-sense strand
cuaucaaagaggacuaguguu

SEQ ID NO: 5937 - RNA, 21 nt, RNAi-antisense strand
cacuaguccucuuugauaguu

SEQ ID NO: 5938 - DNA, 21 bp, Homo sapiens
caaagaggactagtggtttcc

SEQ ID NO: 5939 - RNA, 21 nt, RNAi-sense strand
aagaggacuagugguuuccuu

SEQ ID NO: 5940 - RNA, 21 nt, RNAi-antisense strand
ggaaaccacuaguccucuuuu

SEQ ID NO: 5941 - DNA, 21 bp, Homo sapiens
cagttctttctcctggaggaa

SEQ ID NO: 5942 - RNA, 21 nt, RNAi-sense strand
guucuuucuccuggaggaauu

SEQ ID NO: 5943 - RNA, 21 nt, RNAi-antisense strand
uuccuccaggagaaagaacuu

SEQ ID NO: 5944 - DNA, 21 bp, Homo sapiens
cacaggatccgattatcagta

SEQ ID NO: 5945 - RNA, 21 nt, RNAi-sense strand
caggauccgauuaucaguauu

SEQ ID NO: 5946 - RNA, 21 nt, RNAi-antisense strand
uacugauaaucggauccuguu

SEQ ID NO: 5947 - DNA, 21 bp, Homo sapiens
caggatccgattatcagtatg

SEQ ID NO: 5948 - RNA, 21 nt, RNAi-sense strand
ggauccgauuaucaguauguu

SEQ ID NO: 5949 - RNA, 21 nt, RNAi-antisense strand
cauacugauaaucggauccuu

SEQ ID NO: 5950 - DNA, 21 bp, Homo sapiens
caagttacattcagaccagga

SEQ ID NO: 5951 - RNA, 21 nt, RNAi-sense strand
aguuacauucagaccaggauu

SEQ ID NO: 5952 - RNA, 21 nt, RNAi-antisense strand
uccuggucugaauguaacuuu

SEQ ID NO: 5953 - DNA, 21 bp, Homo sapiens
cattcagaccaggatagagga

SEQ ID NO: 5954 - RNA, 21 nt, RNAi-sense strand
uucagaccaggauagaggauu

SEQ ID NO: 5955 - RNA, 21 nt, RNAi-antisense strand
uccucuauccuggucugaauu

SEQ ID NO: 5956 - DNA, 21 bp, Homo sapiens
cagaccaggatagaggagatg

SEQ ID NO: 5957 - RNA, 21 nt, RNAi-sense strand
gaccaggauagaggagauguu

SEQ ID NO: 5958 - RNA, 21 nt, RNAi-antisense strand
caucuccucuauccuggucuu

SEQ ID NO: 5959 - DNA, 21 bp, Homo sapiens
caggatagaggagatggatca

SEQ ID NO: 5960 - RNA, 21 nt, RNAi-sense strand
ggauagaggagauggaucauu

SEQ ID NO: 5961 - RNA, 21 nt, RNAi-antisense strand
ugauccaucuccucuauccuu

SEQ ID NO: 5962 - DNA, 21 bp, Homo sapiens
caggagatggagcaggagatc

SEQ ID NO: 5963 - RNA, 21 nt, RNAi-sense strand
ggagauggagcaggagaucuu

SEQ ID NO: 5964 - RNA, 21 nt, RNAi-antisense strand
gaucuccugcuccaucuccuu

SEQ ID NO: 5965 - DNA, 21 bp, Homo sapiens
caggagatctcttcattatta

SEQ ID NO: 5966 - RNA, 21 nt, RNAi-sense strand
ggagaucucuucauuauuauu

SEQ ID NO: 5967 - RNA, 21 nt, RNAi-antisense strand
uaauaaugaagagaucuccuu

SEQ ID NO: 5968 - DNA, 21 bp, Homo sapiens
cacaggcgacatacaggccac

SEQ ID NO: 5969 - RNA, 21 nt, RNAi-sense strand
caggcgacauacaggccacuu

SEQ ID NO: 5970 - RNA, 21 nt, RNAi-antisense strand
guggccuguaugucgccuguu

SEQ ID NO: 5971 - DNA, 21 bp, Homo sapiens
caggcgacatacaggccacca

SEQ ID NO: 5972 - RNA, 21 nt, RNAi-sense strand
ggcgacauacaggccaccauu

SEQ ID NO: 5973 - RNA, 21 nt, RNAi-antisense strand
ugguggccuguaugucgccuu

SEQ ID NO: 5974 - DNA, 21 bp, Homo sapiens
catacaggccaccaagaggct

SEQ ID NO: 5975 - RNA, 21 nt, RNAi-sense strand
uacaggccaccaagaggcuuu

SEQ ID NO: 5976 - RNA, 21 nt, RNAi-antisense strand
agccucuugguggccuguauu

SEQ ID NO: 5977 - DNA, 21 bp, Homo sapiens
catccttcgagctcaagctat

SEQ ID NO: 5978 - RNA, 21 nt, RNAi-sense strand
uccuucgagcucaagcuauuu

SEQ ID NO: 5979 - RNA, 21 nt, RNAi-antisense strand
auagcuugagcucgaaggauu

SEQ ID NO: 5980 - DNA, 21 bp, Homo sapiens
caagctataaacagaaggaca

SEQ ID NO: 5981 - RNA, 21 nt, RNAi-sense strand
agcuauaaacagaaggacauu

SEQ ID NO: 5982 - RNA, 21 nt, RNAi-antisense strand
uguccuucuguuuauagcuuu

SEQ ID NO: 5983 - DNA, 21 bp, Homo sapiens
catcatcaagatccatgacat

SEQ ID NO: 5984 - RNA, 21 nt, RNAi-sense strand
ucaucaagauccaugacauuu

SEQ ID NO: 5985 - RNA, 21 nt, RNAi-antisense strand
augucauggaucuugaugauu

SEQ ID NO: 5986 - DNA, 21 bp, Homo sapiens
catcaagatccatgacatcaa

SEQ ID NO: 5987 - RNA, 21 nt, RNAi-sense strand
ucaagauccaugacaucaauu

SEQ ID NO: 5988 - RNA, 21 nt, RNAi-antisense strand
uugaugucauggaucuugauu

SEQ ID NO: 5989 - DNA, 21 bp, Homo sapiens
caagatccatgacatcaatga

SEQ ID NO: 5990 - RNA, 21 nt, RNAi-sense strand
agauccaugacaucaaugauu

SEQ ID NO: 5991 - RNA, 21 nt, RNAi-antisense strand
ucauugaugucauggaucuuu

SEQ ID NO: 5992 - DNA, 21 bp, Homo sapiens
catgacatcaatgacaatgaa

SEQ ID NO: 5993 - RNA, 21 nt, RNAi-sense strand
ugacaucaaugacaaugaauu

SEQ ID NO: 5994 - RNA, 21 nt, RNAi-antisense strand
uucauugucauugaugucauu

SEQ ID NO: 5995 - DNA, 21 bp, Homo sapiens
catcaatgacaatgaaccaat

SEQ ID NO: 5996 - RNA, 21 nt, RNAi-sense strand
ucaaugacaaugaaccaauuu

SEQ ID NO: 5997 - RNA, 21 nt, RNAi-antisense strand
auugguucauugucauugauu

SEQ ID NO: 5998 - DNA, 21 bp, Homo sapiens
caatgaaccaatattcaccaa

SEQ ID NO: 5999 - RNA, 21 nt, RNAi-sense strand
augaaccaauauucaccaauu

SEQ ID NO: 6000 - RNA, 21 nt, RNAi-antisense strand
uuggugaauauugguucauuu

SEQ ID NO: 6001 - DNA, 21 bp, Homo sapiens
caatattcaccaaggaggttt

SEQ ID NO: 6002 - RNA, 21 nt, RNAi-sense strand
auauucaccaaggagguuuuu

SEQ ID NO: 6003 - RNA, 21 nt, RNAi-antisense strand
aaaccuccuuggugaauauuu

SEQ ID NO: 6004 - DNA, 21 bp, Homo sapiens
caccaaggaggtttacacagc

SEQ ID NO: 6005 - RNA, 21 nt, RNAi-sense strand
ccaaggagguuuacacagcuu

SEQ ID NO: 6006 - RNA, 21 nt, RNAi-antisense strand
gcuguguaaaccuccuugguu

SEQ ID NO: 6007 - DNA, 21 bp, Homo sapiens
caaggaggtttacacagccac

SEQ ID NO: 6008 - RNA, 21 nt, RNAi-sense strand
aggagguuuacacagccacuu

SEQ ID NO: 6009 - RNA, 21 nt, RNAi-antisense strand
guggcuguguaaaccuccuuu

SEQ ID NO: 6010 - DNA, 21 bp, Homo sapiens
catttgttgtccaagtcactg

SEQ ID NO: 6011 - RNA, 21 nt, RNAi-sense strand
uuuguuguccaagucacuguu

SEQ ID NO: 6012 - RNA, 21 nt, RNAi-antisense strand
cagugacuuggacaacaaauu

SEQ ID NO: 6013 - DNA, 21 bp, Homo sapiens
caagtcactgcgacggatgca

SEQ ID NO: 6014 - RNA, 21 nt, RNAi-sense strand
agucacugcgacggaugcauu

SEQ ID NO: 6015 - RNA, 21 nt, RNAi-antisense strand
ugcauccgucgcagugacuuu

SEQ ID NO: 6016 - DNA, 21 bp, Homo sapiens
cactgcgacggatgcagatga

SEQ ID NO: 6017 - RNA, 21 nt, RNAi-sense strand
cugcgacggaugcagaugauu

SEQ ID NO: 6018 - RNA, 21 nt, RNAi-antisense strand
ucaucugcauccgucgcaguu

SEQ ID NO: 6019 - DNA, 21 bp, Homo sapiens
cagtgctaaagttgtctacag

SEQ ID NO: 6020 - RNA, 21 nt, RNAi-sense strand
gugcuaaaguugucuacaguu

SEQ ID NO: 6021 - RNA, 21 nt, RNAi-antisense strand
cuguagacaacuuuagcacuu

SEQ ID NO: 6022 - DNA, 21 bp, Homo sapiens
cagttgaatcagaaacaggta

SEQ ID NO: 6023 - RNA, 21 nt, RNAi-sense strand
guugaaucagaaacagguauu

SEQ ID NO: 6024 - RNA, 21 nt, RNAi-antisense strand
uaccuguuucugauucaacuu

SEQ ID NO: 6025 - DNA, 21 bp, Homo sapiens
cagaaacaggtattatcaaga

SEQ ID NO: 6026 - RNA, 21 nt, RNAi-sense strand
gaaacagguauuaucaagauu

SEQ ID NO: 6027 - RNA, 21 nt, RNAi-antisense strand
ucuugauaauaccuguuucuu

SEQ ID NO: 6028 - DNA, 21 bp, Homo sapiens
caggtattatcaagacagctt

SEQ ID NO: 6029 - RNA, 21 nt, RNAi-sense strand
gguauuaucaagacagcuuuu

SEQ ID NO: 6030 - RNA, 21 nt, RNAi-antisense strand
aagcugucuugauaauaccuu

SEQ ID NO: 6031 - DNA, 21 bp, Homo sapiens
caagacagctttgctcaacat

SEQ ID NO: 6032 - RNA, 21 nt, RNAi-sense strand
agacagcuuugcucaacauuu

SEQ ID NO: 6033 - RNA, 21 nt, RNAi-antisense strand
auguugagcaaagcugucuuu

SEQ ID NO: 6034 - DNA, 21 bp, Homo sapiens
cagctttgctcaacatggatc

SEQ ID NO: 6035 - RNA, 21 nt, RNAi-sense strand
gcuuugcucaacauggaucuu

SEQ ID NO: 6036 - RNA, 21 nt, RNAi-antisense strand
gauccauguugagcaaagcuu

SEQ ID NO: 6037 - DNA, 21 bp, Homo sapiens
cagtaccaagtggtgattcaa

SEQ ID NO: 6038 - RNA, 21 nt, RNAi-sense strand
guaccaaguggugauucaauu

SEQ ID NO: 6039 - RNA, 21 nt, RNAi-antisense strand
uugaaucaccacuugguacuu

SEQ ID NO: 6040 - DNA, 21 bp, Homo sapiens
caagtggtgattcaagccaag

SEQ ID NO: 6041 - RNA, 21 nt, RNAi-sense strand
aguggugauucaagccaaguu

SEQ ID NO: 6042 - RNA, 21 nt, RNAi-antisense strand
cuuggcuugaaucaccacuuu

SEQ ID NO: 6043 - DNA, 21 bp, Homo sapiens
caccaccgtgaacatcacact

SEQ ID NO: 6044 - RNA, 21 nt, RNAi-sense strand
ccaccgugaacaucacacuuu

SEQ ID NO: 6045 - RNA, 21 nt, RNAi-antisense strand
agugugauguucacggugguu

SEQ ID NO: 6046 - DNA, 21 bp, Homo sapiens
caccgtgaacatcacactgac

SEQ ID NO: 6047 - RNA, 21 nt, RNAi-sense strand
ccgugaacaucacacugacuu

SEQ ID NO: 6048 - RNA, 21 nt, RNAi-antisense strand
gucagugugauguucacgguu

SEQ ID NO: 6049 - DNA, 21 bp, Homo sapiens
catcacactgactgatgtcaa

SEQ ID NO: 6050 - RNA, 21 nt, RNAi-sense strand
ucacacugacugaugucaauu

SEQ ID NO: 6051 - RNA, 21 nt, RNAi-antisense strand
uugacaucagucagugugauu

SEQ ID NO: 6052 - DNA, 21 bp, Homo sapiens
cacactgactgatgtcaacga

SEQ ID NO: 6053 - RNA, 21 nt, RNAi-sense strand
cacugacugaugucaacgauu

SEQ ID NO: 6054 - RNA, 21 nt, RNAi-antisense strand
ucguugacaucagucaguguu

SEQ ID NO: 6055 - DNA, 21 bp, Homo sapiens
cactgactgatgtcaacgaca

SEQ ID NO: 6056 - RNA, 21 nt, RNAi-sense strand
cugacugaugucaacgacauu

SEQ ID NO: 6057 - RNA, 21 nt, RNAi-antisense strand
ugucguugacaucagucaguu

SEQ ID NO: 6058 - DNA, 21 bp, Homo sapiens
cagagtacataccagtttaaa

SEQ ID NO: 6059 - RNA, 21 nt, RNAi-sense strand
gaguacauaccaguuuaaauu

SEQ ID NO: 6060 - RNA, 21 nt, RNAi-antisense strand
uuuaaacugguauguacucuu

SEQ ID NO: 6061 - DNA, 21 bp, Homo sapiens
caccaattggcagaatcaaag

SEQ ID NO: 6062 - RNA, 21 nt, RNAi-sense strand
ccaauuggcagaaucaaaguu

SEQ ID NO: 6063 - RNA, 21 nt, RNAi-antisense strand
cuuugauucugccaauugguu

SEQ ID NO: 6064 - DNA, 21 bp, Homo sapiens
caattggcagaatcaaagcca

SEQ ID NO: 6065 - RNA, 21 nt, RNAi-sense strand
auuggcagaaucaaagccauu

SEQ ID NO: 6066 - RNA, 21 nt, RNAi-antisense strand
uggcuuugauucugccaauuu

SEQ ID NO: 6067 - DNA, 21 bp, Homo sapiens
cagaatcaaagccagcgacgc

SEQ ID NO: 6068 - RNA, 21 nt, RNAi-sense strand
gaaucaaagccagcgacgcuu

SEQ ID NO: 6069 - RNA, 21 nt, RNAi-antisense strand
gcgucgcuggcuuugauucuu

SEQ ID NO: 6070 - DNA, 21 bp, Homo sapiens
caaagccagcgacgctgatgt

SEQ ID NO: 6071 - RNA, 21 nt, RNAi-sense strand
aagccagcgacgcugauguuu

SEQ ID NO: 6072 - RNA, 21 nt, RNAi-antisense strand
acaucagcgucgcuggcuuuu

SEQ ID NO: 6073 - DNA, 21 bp, Homo sapiens
caatccttatgttgagccacg

SEQ ID NO: 6074 - RNA, 21 nt, RNAi-sense strand
auccuuauguugagccacguu

SEQ ID NO: 6075 - RNA, 21 nt, RNAi-antisense strand
cguggcucaacauaaggauuu

SEQ ID NO: 6076 - DNA, 21 bp, Homo sapiens
caaagattcagccacggttag

SEQ ID NO: 6077 - RNA, 21 nt, RNAi-sense strand
aagauucagccacgguuaguu

SEQ ID NO: 6078 - RNA, 21 nt, RNAi-antisense strand
cuaaccguggcugaaucuuuu

SEQ ID NO: 6079 - DNA, 21 bp, Homo sapiens
cagccacggttagaattgtgg

SEQ ID NO: 6080 - RNA, 21 nt, RNAi-sense strand
gccacgguuagaauugugguu

SEQ ID NO: 6081 - RNA, 21 nt, RNAi-antisense strand
ccacaauucuaaccguggcuu

SEQ ID NO: 6082 - DNA, 21 bp, Homo sapiens
cacggttagaattgtggtgga

SEQ ID NO: 6083 - RNA, 21 nt, RNAi-sense strand
cgguuagaauugugguggauu

SEQ ID NO: 6084 - RNA, 21 nt, RNAi-antisense strand
uccaccacaauucuaaccguu

SEQ ID NO: 6085 - DNA, 21 bp, Homo sapiens
cacctgtcttcagcaaactgg

SEQ ID NO: 6086 - RNA, 21 nt, RNAi-sense strand
ccugucuucagcaaacugguu

SEQ ID NO: 6087 - RNA, 21 nt, RNAi-antisense strand
ccaguuugcugaagacagguu

SEQ ID NO: 6088 - DNA, 21 bp, Homo sapiens
cagcaaactggcctacatctt

SEQ ID NO: 6089 - RNA, 21 nt, RNAi-sense strand
gcaaacuggccuacaucuuuu

SEQ ID NO: 6090 - RNA, 21 nt, RNAi-antisense strand
aagauguaggccaguuugcuu

SEQ ID NO: 6091 - DNA, 21 bp, Homo sapiens
caaactggcctacatcttaca

SEQ ID NO: 6092 - RNA, 21 nt, RNAi-sense strand
aacuggccuacaucuuacauu

SEQ ID NO: 6093 - RNA, 21 nt, RNAi-antisense strand
uguaagauguaggccaguuuu

SEQ ID NO: 6094 - DNA, 21 bp, Homo sapiens
caaataagagaagatgctcag

SEQ ID NO: 6095 - RNA, 21 nt, RNAi-sense strand
aauaagagaagaugcucaguu

SEQ ID NO: 6096 - RNA, 21 nt, RNAi-antisense strand
cugagcaucuucucuuauuuu

SEQ ID NO: 6097 - DNA, 21 bp, Homo sapiens
cagataaacaccacaataggc

SEQ ID NO: 6098 - RNA, 21 nt, RNAi-sense strand
gauaaacaccacaauaggcuu

SEQ ID NO: 6099 - RNA, 21 nt, RNAi-antisense strand
gccuauugugguguuuaucuu

SEQ ID NO: 6100 - DNA, 21 bp, Homo sapiens
caccacaataggctccgtcac

SEQ ID NO: 6101 - RNA, 21 nt, RNAi-sense strand
ccacaauaggcuccgucacuu

SEQ ID NO: 6102 - RNA, 21 nt, RNAi-antisense strand
gugacggagccuauugugguu

SEQ ID NO: 6103 - DNA, 21 bp, Homo sapiens
cacaataggctccgtcacagc

SEQ ID NO: 6104 - RNA, 21 nt, RNAi-sense strand
caauaggcuccgucacagcuu

SEQ ID NO: 6105 - RNA, 21 nt, RNAi-antisense strand
gcugugacggagccuauuguu

SEQ ID NO: 6106 - DNA, 21 bp, Homo sapiens
caagatccagatgctgccagg

SEQ ID NO: 6107 - RNA, 21 nt, RNAi-sense strand
agauccagaugcugccagguu

SEQ ID NO: 6108 - RNA, 21 nt, RNAi-antisense strand
ccuggcagcaucuggaucuuu

SEQ ID NO: 6109 - DNA, 21 bp, Homo sapiens
cagatgctgccaggaatcctg

SEQ ID NO: 6110 - RNA, 21 nt, RNAi-sense strand
gaugcugccaggaauccuguu

SEQ ID NO: 6111 - RNA, 21 nt, RNAi-antisense strand
caggauuccuggcagcaucuu

SEQ ID NO: 6112 - DNA, 21 bp, Homo sapiens
caggaatcctgtcaagtactc

SEQ ID NO: 6113 - RNA, 21 nt, RNAi-sense strand
ggaauccugucaaguacucuu

SEQ ID NO: 6114 - RNA, 21 nt, RNAi-antisense strand
gaguacuugacaggauuccuu

SEQ ID NO: 6115 - DNA, 21 bp, Homo sapiens
caagtactctgtagatcgaca

SEQ ID NO: 6116 - RNA, 21 nt, RNAi-sense strand
aguacucuguagaucgacauu

SEQ ID NO: 6117 - RNA, 21 nt, RNAi-antisense strand
ugucgaucuacagaguacuuu

SEQ ID NO: 6118 - DNA, 21 bp, Homo sapiens
cacacagatatggacagaata

SEQ ID NO: 6119 - RNA, 21 nt, RNAi-sense strand
cacagauauggacagaauauu

SEQ ID NO: 6120 - RNA, 21 nt, RNAi-antisense strand
uauucuguccauaucuguguu

SEQ ID NO: 6121 - DNA, 21 bp, Homo sapiens
cacagatatggacagaatatt

SEQ ID NO: 6122 - RNA, 21 nt, RNAi-sense strand
cagauauggacagaauauuuu

SEQ ID NO: 6123 - RNA, 21 nt, RNAi-antisense strand
aauauucuguccauaucuguu

SEQ ID NO: 6124 - DNA, 21 bp, Homo sapiens
cagatatggacagaatattca

SEQ ID NO: 6125 - RNA, 21 nt, RNAi-sense strand
gauauggacagaauauucauu

SEQ ID NO: 6126 - RNA, 21 nt, RNAi-antisense strand
ugaauauucuguccauaucuu

SEQ ID NO: 6127 - DNA, 21 bp, Homo sapiens
caacattgattctggaaatgg

SEQ ID NO: 6128 - RNA, 21 nt, RNAi-sense strand
acauugauucuggaaaugguu

SEQ ID NO: 6129 - RNA, 21 nt, RNAi-antisense strand
ccauuuccagaaucaauguuu

SEQ ID NO: 6130 - DNA, 21 bp, Homo sapiens
cattgattctggaaatggttc

SEQ ID NO: 6131 - RNA, 21 nt, RNAi-sense strand
uugauucuggaaaugguucuu

SEQ ID NO: 6132 - RNA, 21 nt, RNAi-antisense strand
gaaccauuuccagaaucaauu

SEQ ID NO: 6133 - DNA, 21 bp, Homo sapiens
catcgaaacttcttgaccgag

SEQ ID NO: 6134 - RNA, 21 nt, RNAi-sense strand
ucgaaacuucuugaccgaguu

SEQ ID NO: 6135 - RNA, 21 nt, RNAi-antisense strand
cucggucaagaaguuucgauu

SEQ ID NO: 6136 - DNA, 21 bp, Homo sapiens
cactgctatggcacaacatta

SEQ ID NO: 6137 - RNA, 21 nt, RNAi-sense strand
cugcuauggcacaacauuauu

SEQ ID NO: 6138 - RNA, 21 nt, RNAi-antisense strand
uaauguugugccauagcaguu

SEQ ID NO: 6139 - DNA, 21 bp, Homo sapiens
cacaacattacagtgatagca

SEQ ID NO: 6140 - RNA, 21 nt, RNAi-sense strand
caacauuacagugauagcauu

SEQ ID NO: 6141 - RNA, 21 nt, RNAi-antisense strand
ugcuaucacuguaauguuguu

SEQ ID NO: 6142 - DNA, 21 bp, Homo sapiens
caacattacagtgatagcaac

SEQ ID NO: 6143 - RNA, 21 nt, RNAi-sense strand
acauuacagugauagcaacuu

SEQ ID NO: 6144 - RNA, 21 nt, RNAi-antisense strand
guugcuaucacuguaauguuu

SEQ ID NO: 6145 - DNA, 21 bp, Homo sapiens
cattacagtgatagcaacaga

SEQ ID NO: 6146 - RNA, 21 nt, RNAi-sense strand
uuacagugauagcaacagauu

SEQ ID NO: 6147 - RNA, 21 nt, RNAi-antisense strand
ucuguugcuaucacuguaauu

SEQ ID NO: 6148 - DNA, 21 bp, Homo sapiens
cagtgatagcaacagagatca

SEQ ID NO: 6149 - RNA, 21 nt, RNAi-sense strand
gugauagcaacagagaucauu

SEQ ID NO: 6150 - RNA, 21 nt, RNAi-antisense strand
ugaucucuguugcuaucacuu

SEQ ID NO: 6151 - DNA, 21 bp, Homo sapiens
caacagagatcaataatccaa

SEQ ID NO: 6152 - RNA, 21 nt, RNAi-sense strand
acagagaucaauaauccaauu

SEQ ID NO: 6153 - RNA, 21 nt, RNAi-antisense strand
uuggauuauugaucucuguuu

SEQ ID NO: 6154 - DNA, 21 bp, Homo sapiens
cagagatcaataatccaaagc

SEQ ID NO: 6155 - RNA, 21 nt, RNAi-sense strand
gagaucaauaauccaaagcuu

SEQ ID NO: 6156 - RNA, 21 nt, RNAi-antisense strand
gcuuuggauuauugaucucuu

SEQ ID NO: 6157 - DNA, 21 bp, Homo sapiens
caataatccaaagcaaagtag

SEQ ID NO: 6158 - RNA, 21 nt, RNAi-sense strand
auaauccaaagcaaaguaguu

SEQ ID NO: 6159 - RNA, 21 nt, RNAi-antisense strand
cuacuuugcuuuggauuauuu

SEQ ID NO: 6160 - DNA, 21 bp, Homo sapiens
caaagcaaagtagtcgagtac

SEQ ID NO: 6161 - RNA, 21 nt, RNAi-sense strand
aagcaaaguagucgaguacuu

SEQ ID NO: 6162 - RNA, 21 nt, RNAi-antisense strand
guacucgacuacuuugcuuuu

SEQ ID NO: 6163 - DNA, 21 bp, Homo sapiens
caaagtagtcgagtacctcta

SEQ ID NO: 6164 - RNA, 21 nt, RNAi-sense strand
aaguagucgaguaccucuauu

SEQ ID NO: 6165 - RNA, 21 nt, RNAi-antisense strand
uagagguacucgacuacuuuu

SEQ ID NO: 6166 - DNA, 21 bp, Homo sapiens
cagaatttgctgagttctatg

SEQ ID NO: 6167 - RNA, 21 nt, RNAi-sense strand
gaauuugcugaguucuauguu

SEQ ID NO: 6168 - RNA, 21 nt, RNAi-antisense strand
cauagaacucagcaaauucuu

SEQ ID NO: 6169 - DNA, 21 bp, Homo sapiens
caaaggcagatcagttgattc

SEQ ID NO: 6170 - RNA, 21 nt, RNAi-sense strand
aaggcagaucaguugauucuu

SEQ ID NO: 6171 - RNA, 21 nt, RNAi-antisense strand
gaaucaacugaucugccuuuu

SEQ ID NO: 6172 - DNA, 21 bp, Homo sapiens
catgctgttgacaaggatgac

SEQ ID NO: 6173 - RNA, 21 nt, RNAi-sense strand
ugcuguugacaaggaugacuu

SEQ ID NO: 6174 - RNA, 21 nt, RNAi-antisense strand
gucauccuugucaacagcauu

SEQ ID NO: 6175 - DNA, 21 bp, Homo sapiens
cagccagtggctcaaacttta

SEQ ID NO: 6176 - RNA, 21 nt, RNAi-sense strand
gccaguggcucaaacuuuauu

SEQ ID NO: 6177 - RNA, 21 nt, RNAi-antisense strand
uaaaguuugagccacuggcuu

SEQ ID NO: 6178 - DNA, 21 bp, Homo sapiens
cagtggctcaaactttaccat

SEQ ID NO: 6179 - RNA, 21 nt, RNAi-sense strand
guggcucaaacuuuaccauuu

SEQ ID NO: 6180 - RNA, 21 nt, RNAi-antisense strand
augguaaaguuugagccacuu

SEQ ID NO: 6181 - DNA, 21 bp, Homo sapiens
caaactttaccattcaagaca

SEQ ID NO: 6182 - RNA, 21 nt, RNAi-sense strand
aacuuuaccauucaagacauu

SEQ ID NO: 6183 - RNA, 21 nt, RNAi-antisense strand
ugucuugaaugguaaaguuuu

SEQ ID NO: 6184 - DNA, 21 bp, Homo sapiens
cattcaagacaacaaagacaa

SEQ ID NO: 6185 - RNA, 21 nt, RNAi-sense strand
uucaagacaacaaagacaauu

SEQ ID NO: 6186 - RNA, 21 nt, RNAi-antisense strand
uugucuuuguugucuugaauu

SEQ ID NO: 6187 - DNA, 21 bp, Homo sapiens
caagacaacaaagacaacacg

SEQ ID NO: 6188 - RNA, 21 nt, RNAi-sense strand
agacaacaaagacaacacguu

SEQ ID NO: 6189 - RNA, 21 nt, RNAi-antisense strand
cguguugucuuuguugucuuu

SEQ ID NO: 6190 - DNA, 21 bp, Homo sapiens
cacgagatgagcacctatctc

SEQ ID NO: 6191 - RNA, 21 nt, RNAi-sense strand
cgagaugagcaccuaucucuu

SEQ ID NO: 6192 - RNA, 21 nt, RNAi-antisense strand
gagauaggugcucaucucguu

SEQ ID NO: 6193 - DNA, 21 bp, Homo sapiens
cacctatctcttgcctgtggt

SEQ ID NO: 6194 - RNA, 21 nt, RNAi-sense strand
ccuaucucuugccugugguuu

SEQ ID NO: 6195 - RNA, 21 nt, RNAi-antisense strand
accacaggcaagagauagguu

SEQ ID NO: 6196 - DNA, 21 bp, Homo sapiens
catgcaatcctgccatgcgga

SEQ ID NO: 6197 - RNA, 21 nt, RNAi-sense strand
ugcaauccugccaugcggauu

SEQ ID NO: 6198 - RNA, 21 nt, RNAi-antisense strand
uccgcauggcaggauugcauu

SEQ ID NO: 6199 - DNA, 21 bp, Homo sapiens
catccttctgtgcatcgtgat

SEQ ID NO: 6200 - RNA, 21 nt, RNAi-sense strand
uccuucugugcaucgugauuu

SEQ ID NO: 6201 - RNA, 21 nt, RNAi-antisense strand
aucacgaugcacagaaggauu

SEQ ID NO: 6202 - DNA, 21 bp, Homo sapiens
catcgtgatcctactagtgac

SEQ ID NO: 6203 - RNA, 21 nt, RNAi-sense strand
ucgugauccuacuagugacuu

SEQ ID NO: 6204 - RNA, 21 nt, RNAi-antisense strand
gucacuaguaggaucacgauu

SEQ ID NO: 6205 - DNA, 21 bp, Homo sapiens
cagtggtgctgtttgcagctc

SEQ ID NO: 6206 - RNA, 21 nt, RNAi-sense strand
guggugcuguuugcagcucuu

SEQ ID NO: 6207 - RNA, 21 nt, RNAi-antisense strand
gagcugcaaacagcaccacuu

SEQ ID NO: 6208 - DNA, 21 bp, Homo sapiens
catttccaaagaggacatcag

SEQ ID NO: 6209 - RNA, 21 nt, RNAi-sense strand
uuuccaaagaggacaucaguu

SEQ ID NO: 6210 - RNA, 21 nt, RNAi-antisense strand
cugauguccucuuuggaaauu

SEQ ID NO: 6211 - DNA, 21 bp, Homo sapiens
caaagaggacatcagagataa

SEQ ID NO: 6212 - RNA, 21 nt, RNAi-sense strand
aagaggacaucagagauaauu

SEQ ID NO: 6213 - RNA, 21 nt, RNAi-antisense strand
uuaucucugauguccucuuuu

SEQ ID NO: 6214 - DNA, 21 bp, Homo sapiens
catcagagataacattgtcag

SEQ ID NO: 6215 - RNA, 21 nt, RNAi-sense strand
ucagagauaacauugucaguu

SEQ ID NO: 6216 - RNA, 21 nt, RNAi-antisense strand
cugacaauguuaucucugauu

SEQ ID NO: 6217 - DNA, 21 bp, Homo sapiens
cagagataacattgtcagtta

SEQ ID NO: 6218 - RNA, 21 nt, RNAi-sense strand
gagauaacauugucaguuauu

SEQ ID NO: 6219 - RNA, 21 nt, RNAi-antisense strand
uaacugacaauguuaucucuu

SEQ ID NO: 6220 - DNA, 21 bp, Homo sapiens
cattgtcagttacaacgacga

SEQ ID NO: 6221 - RNA, 21 nt, RNAi-sense strand
uugucaguuacaacgacgauu

SEQ ID NO: 6222 - RNA, 21 nt, RNAi-antisense strand
ucgucguuguaacugacaauu

SEQ ID NO: 6223 - DNA, 21 bp, Homo sapiens
cagttacaacgacgaaggtgg

SEQ ID NO: 6224 - RNA, 21 nt, RNAi-sense strand
guuacaacgacgaaggugguu

SEQ ID NO: 6225 - RNA, 21 nt, RNAi-antisense strand
ccaccuucgucguuguaacuu

SEQ ID NO: 6226 - DNA, 21 bp, Homo sapiens
caacgacgaaggtggtggaga

SEQ ID NO: 6227 - RNA, 21 nt, RNAi-sense strand
acgacgaaggugguggagauu

SEQ ID NO: 6228 - RNA, 21 nt, RNAi-antisense strand
ucuccaccaccuucgucguuu

SEQ ID NO: 6229 - DNA, 21 bp, Homo sapiens
catagaggacaacaaattacg

SEQ ID NO: 6230 - RNA, 21 nt, RNAi-sense strand
uagaggacaacaaauuacguu

SEQ ID NO: 6231 - RNA, 21 nt, RNAi-antisense strand
cguaauuuguuguccucuauu

SEQ ID NO: 6232 - DNA, 21 bp, Homo sapiens
caacagctcgcgacaacaccg

SEQ ID NO: 6233 - RNA, 21 nt, RNAi-sense strand
acagcucgcgacaacaccguu

SEQ ID NO: 6234 - RNA, 21 nt, RNAi-antisense strand
cgguguugucgcgagcuguuu

SEQ ID NO: 6235 - DNA, 21 bp, Homo sapiens
cagctcgcgacaacaccgatg

SEQ ID NO: 6236 - RNA, 21 nt, RNAi-sense strand
gcucgcgacaacaccgauguu

SEQ ID NO: 6237 - RNA, 21 nt, RNAi-antisense strand
caucgguguugucgcgagcuu

SEQ ID NO: 6238 - DNA, 21 bp, Homo sapiens
caacaccgatgtcagagattt

SEQ ID NO: 6239 - RNA, 21 nt, RNAi-sense strand
acaccgaugucagagauuuuu

SEQ ID NO: 6240 - RNA, 21 nt, RNAi-antisense strand
aaaucucugacaucgguguuu

SEQ ID NO: 6241 - DNA, 21 bp, Homo sapiens
caccgatgtcagagatttcat

SEQ ID NO: 6242 - RNA, 21 nt, RNAi-sense strand
ccgaugucagagauuucauuu

SEQ ID NO: 6243 - RNA, 21 nt, RNAi-antisense strand
augaaaucucugacaucgguu

SEQ ID NO: 6244 - DNA, 21 bp, Homo sapiens
cagagatttcattaaccaaag

SEQ ID NO: 6245 - RNA, 21 nt, RNAi-sense strand
gagauuucauuaaccaaaguu

SEQ ID NO: 6246 - RNA, 21 nt, RNAi-antisense strand
cuuugguuaaugaaaucucuu

SEQ ID NO: 6247 - DNA, 21 bp, Homo sapiens
cattaaccaaaggttaaagga

SEQ ID NO: 6248 - RNA, 21 nt, RNAi-sense strand
uuaaccaaagguuaaaggauu

SEQ ID NO: 6249 - RNA, 21 nt, RNAi-antisense strand
uccuuuaaccuuugguuaauu

SEQ ID NO: 6250 - DNA, 21 bp, Homo sapiens
catacgactccttggccactt

SEQ ID NO: 6251 - RNA, 21 nt, RNAi-sense strand
uacgacuccuuggccacuuuu

SEQ ID NO: 6252 - RNA, 21 nt, RNAi-antisense strand
aaguggccaaggagucguauu

SEQ ID NO: 6253 - DNA, 21 bp, Homo sapiens
cacttacgcctatgaaggcac

SEQ ID NO: 6254 - RNA, 21 nt, RNAi-sense strand
cuuacgccuaugaaggcacuu

SEQ ID NO: 6255 - RNA, 21 nt, RNAi-antisense strand
gugccuucauaggcguaaguu

SEQ ID NO: 6256 - DNA, 21 bp, Homo sapiens
cagtgaccacggatgcagatc

SEQ ID NO: 6257 - RNA, 21 nt, RNAi-sense strand
gugaccacggaugcagaucuu

SEQ ID NO: 6258 - RNA, 21 nt, RNAi-antisense strand
gaucugcauccguggucacuu

SEQ ID NO: 6259 - DNA, 21 bp, Homo sapiens
cacggatgcagatcaagacta

SEQ ID NO: 6260 - RNA, 21 nt, RNAi-sense strand
cggaugcagaucaagacuauu

SEQ ID NO: 6261 - RNA, 21 nt, RNAi-antisense strand
uagucuugaucugcauccguu

SEQ ID NO: 6262 - DNA, 21 bp, Homo sapiens
cagatcaagactatgattacc

SEQ ID NO: 6263 - RNA, 21 nt, RNAi-sense strand
gaucaagacuaugauuaccuu

SEQ ID NO: 6264 - RNA, 21 nt, RNAi-antisense strand
gguaaucauagucuugaucuu

SEQ ID NO: 6265 - DNA, 21 bp, Homo sapiens
caagactatgattaccttagt

SEQ ID NO: 6266 - RNA, 21 nt, RNAi-sense strand
agacuaugauuaccuuaguuu

SEQ ID NO: 6267 - RNA, 21 nt, RNAi-antisense strand
acuaagguaaucauagucuuu

SEQ ID NO: 6268 - DNA, 21 bp, Homo sapiens
cagatatgtatggaggagtgg

SEQ ID NO: 6269 - RNA, 21 nt, RNAi-sense strand
gauauguauggaggagugguu

SEQ ID NO: 6270 - RNA, 21 nt, RNAi-antisense strand
ccacuccuccauacauaucuu

SEQ ID NO: 6271 - DNA, 21 bp, Homo sapiens
cagtgacaaagactcctaatc

SEQ ID NO: 6272 - RNA, 21 nt, RNAi-sense strand
gugacaaagacuccuaaucuu

SEQ ID NO: 6273 - RNA, 21 nt, RNAi-antisense strand
gauuaggagucuuugucacuu

SEQ ID NO: 6274 - DNA, 21 bp, Homo sapiens
caaagactcctaatctgttgc

SEQ ID NO: 6275 - RNA, 21 nt, RNAi-sense strand
aagacuccuaaucuguugcuu

SEQ ID NO: 6276 - RNA, 21 nt, RNAi-antisense strand
gcaacagauuaggagucuuuu

SEQ ID NO: 6277 - DNA, 21 bp, Homo sapiens
caatacgacactgaaatatgt

SEQ ID NO: 6278 - RNA, 21 nt, RNAi-sense strand
auacgacacugaaauauguuu

SEQ ID NO: 6279 - RNA, 21 nt, RNAi-antisense strand
acauauuucagugucguauuu

SEQ ID NO: 6280 - DNA, 21 bp, Homo sapiens
cactgaaatatgtgaagtggc

SEQ ID NO: 6281 - RNA, 21 nt, RNAi-sense strand
cugaaauaugugaaguggcuu

SEQ ID NO: 6282 - RNA, 21 nt, RNAi-antisense strand
gccacuucacauauuucaguu

SEQ ID NO: 6283 - DNA, 21 bp, Homo sapiens
cactactccgtgaaggcttct

SEQ ID NO: 6284 - RNA, 21 nt, RNAi-sense strand
cuacuccgugaaggcuucuuu

SEQ ID NO: 6285 - RNA, 21 nt, RNAi-antisense strand
agaagccuucacggaguaguu

SEQ ID NO: 6286 - DNA, 21 bp, Homo sapiens
caatggctgcagtccgtgtgg

SEQ ID NO: 6287 - RNA, 21 nt, RNAi-sense strand
auggcugcaguccgugugguu

SEQ ID NO: 6288 - RNA, 21 nt, RNAi-antisense strand
ccacacggacugcagccauuu

SEQ ID NO: 6289 - DNA, 21 bp, Homo sapiens
cagtccgtgtggatccaatgt

SEQ ID NO: 6290 - RNA, 21 nt, RNAi-sense strand
guccguguggauccaauguuu

SEQ ID NO: 6291 - RNA, 21 nt, RNAi-antisense strand
acauuggauccacacggacuu

SEQ ID NO: 6292 - DNA, 21 bp, Homo sapiens
catccagttaaccaagtcagc

SEQ ID NO: 6293 - RNA, 21 nt, RNAi-sense strand
uccaguuaaccaagucagcuu

SEQ ID NO: 6294 - RNA, 21 nt, RNAi-antisense strand
gcugacuugguuaacuggauu

SEQ ID NO: 6295 - DNA, 21 bp, Homo sapiens
cagtatttccacttgttctca

SEQ ID NO: 6296 - RNA, 21 nt, RNAi-sense strand
guauuuccacuuguucucauu

SEQ ID NO: 6297 - RNA, 21 nt, RNAi-antisense strand
ugagaacaaguggaaauacuu

SEQ ID NO: 6298 - DNA, 21 bp, Homo sapiens
cactccatgtcaggtcagcca

SEQ ID NO: 6299 - RNA, 21 nt, RNAi-sense strand
cuccaugucaggucagccauu

SEQ ID NO: 6300 - RNA, 21 nt, RNAi-antisense strand
uggcugaccugacauggaguu

SEQ ID NO: 6301 - DNA, 21 bp, Homo sapiens
catgtcaggtcagccaactgc

SEQ ID NO: 6302 - RNA, 21 nt, RNAi-sense strand
ugucaggucagccaacugcuu

SEQ ID NO: 6303 - RNA, 21 nt, RNAi-antisense strand
gcaguuggcugaccugacauu

SEQ ID NO: 6304 - DNA, 21 bp, Homo sapiens
catatcggctcacaaagagat

SEQ ID NO: 6305 - RNA, 21 nt, RNAi-sense strand
uaucggcucacaaagagauuu

SEQ ID NO: 6306 - RNA, 21 nt, RNAi-antisense strand
aucucuuugugagccgauauu

SEQ ID NO: 6307 - DNA, 21 bp, Homo sapiens
caaagagataaactacatagg

SEQ ID NO: 6308 - RNA, 21 nt, RNAi-sense strand
aagagauaaacuacauagguu

SEQ ID NO: 6309 - RNA, 21 nt, RNAi-antisense strand
ccuauguaguuuaucucuuuu

SEQ ID NO: 6310 - DNA, 21 bp, Homo sapiens
catgctatttgttcttcaaga

SEQ ID NO: 6311 - RNA, 21 nt, RNAi-sense strand
ugcuauuuguucuucaagauu

SEQ ID NO: 6312 - RNA, 21 nt, RNAi-antisense strand
ucuugaagaacaaauagcauu

SEQ ID NO: 6313 - DNA, 21 bp, Homo sapiens
caagaactttctctgccatca

SEQ ID NO: 6314 - RNA, 21 nt, RNAi-sense strand
agaacuuucucugccaucauu

SEQ ID NO: 6315 - RNA, 21 nt, RNAi-antisense strand
ugauggcagagaaaguucuuu

SEQ ID NO: 6316 - DNA, 21 bp, Homo sapiens
caaattaaacggtaacatcca

SEQ ID NO: 6317 - RNA, 21 nt, RNAi-sense strand
aauuaaacgguaacauccauu

SEQ ID NO: 6318 - RNA, 21 nt, RNAi-antisense strand
uggauguuaccguuuaauuuu

SEQ ID NO: 6319 - DNA, 21 bp, Homo sapiens
caaccacaaacctagtacgac

SEQ ID NO: 6320 - RNA, 21 nt, RNAi-sense strand
accacaaaccuaguacgacuu

SEQ ID NO: 6321 - RNA, 21 nt, RNAi-antisense strand
gucguacuagguuugugguuu

SEQ ID NO: 6322 - DNA, 21 bp, Homo sapiens
cacaaacctagtacgacttca

SEQ ID NO: 6323 - RNA, 21 nt, RNAi-sense strand
caaaccuaguacgacuucauu

SEQ ID NO: 6324 - RNA, 21 nt, RNAi-antisense strand
ugaagucguacuagguuuguu

SEQ ID NO: 6325 - DNA, 21 bp, Homo sapiens
caaacctagtacgacttcatt

SEQ ID NO: 6326 - RNA, 21 nt, RNAi-sense strand
aaccuaguacgacuucauuuu

SEQ ID NO: 6327 - RNA, 21 nt, RNAi-antisense strand
aaugaagucguacuagguuuu

SEQ ID NO: 6328 - DNA, 21 bp, Homo sapiens
cattccttccactaactcata

SEQ ID NO: 6329 - RNA, 21 nt, RNAi-sense strand
uuccuuccacuaacucauauu

SEQ ID NO: 6330 - RNA, 21 nt, RNAi-antisense strand
uaugaguuaguggaaggaauu

SEQ ID NO: 6331 - DNA, 21 bp, Homo sapiens
catgcgaaagtttgcctttgt

SEQ ID NO: 6332 - RNA, 21 nt, RNAi-sense strand
ugcgaaaguuugccuuuguuu

SEQ ID NO: 6333 - RNA, 21 nt, RNAi-antisense strand
acaaaggcaaacuuucgcauu

SEQ ID NO: 6334 - DNA, 21 bp, Homo sapiens
cacttgaaattctttcagcta

SEQ ID NO: 6335 - RNA, 21 nt, RNAi-sense strand
cuugaaauucuuucagcuauu

SEQ ID NO: 6336 - RNA, 21 nt, RNAi-antisense strand
uagcugaaagaauuucaaguu

SEQ ID NO: 6337 - DNA, 21 bp, Homo sapiens
cagctatcagtaggctaatgt

SEQ ID NO: 6338 - RNA, 21 nt, RNAi-sense strand
gcuaucaguaggcuaauguuu

SEQ ID NO: 6339 - RNA, 21 nt, RNAi-antisense strand
acauuagccuacugauagcuu

SEQ ID NO: 6340 - DNA, 21 bp, Homo sapiens
catgaaagtagcagtgtgaag

SEQ ID NO: 6341 - RNA, 21 nt, RNAi-sense strand
ugaaaguagcagugugaaguu

SEQ ID NO: 6342 - RNA, 21 nt, RNAi-antisense strand
cuucacacugcuacuuucauu

SEQ ID NO: 6343 - DNA, 21 bp, Homo sapiens
cagtgtgaagtacaataattc

SEQ ID NO: 6344 - RNA, 21 nt, RNAi-sense strand
gugugaaguacaauaauucuu

SEQ ID NO: 6345 - RNA, 21 nt, RNAi-antisense strand
gaauuauuguacuucacacuu

SEQ ID NO: 6346 - DNA, 21 bp, Homo sapiens
catatccttcttacacgacta

SEQ ID NO: 6347 - RNA, 21 nt, RNAi-sense strand
uauccuucuuacacgacuauu

SEQ ID NO: 6348 - RNA, 21 nt, RNAi-antisense strand
uagucguguaagaaggauauu

SEQ ID NO: 6349 - DNA, 21 bp, Homo sapiens
cacgactaagttgaattagta

SEQ ID NO: 6350 - RNA, 21 nt, RNAi-sense strand
cgacuaaguugaauuaguauu

SEQ ID NO: 6351 - RNA, 21 nt, RNAi-antisense strand
uacuaauucaacuuagucguu

SEQ ID NO: 6352 - DNA, 21 bp, Homo sapiens
cactctaggagttcagtggag

SEQ ID NO: 6353 - RNA, 21 nt, RNAi-sense strand
cucuaggaguucaguggaguu

SEQ ID NO: 6354 - RNA, 21 nt, RNAi-antisense strand
cuccacugaacuccuagaguu

SEQ ID NO: 6355 - DNA, 21 bp, Homo sapiens
cagtggagaggttagagccag

SEQ ID NO: 6356 - RNA, 21 nt, RNAi-sense strand
guggagagguuagagccaguu

SEQ ID NO: 6357 - RNA, 21 nt, RNAi-antisense strand
cuggcucuaaccucuccacuu

SEQ ID NO: 6358 - DNA, 21 bp, Homo sapiens
cagccacacttgaacctaata

SEQ ID NO: 6359 - RNA, 21 nt, RNAi-sense strand
gccacacuugaaccuaauauu

SEQ ID NO: 6360 - RNA, 21 nt, RNAi-antisense strand
uauuagguucaaguguggcuu

SEQ ID NO: 6361 - DNA, 21 bp, Homo sapiens
catctggaaacctctacatat

SEQ ID NO: 6362 - RNA, 21 nt, RNAi-sense strand
ucuggaaaccucuacauauuu

SEQ ID NO: 6363 - RNA, 21 nt, RNAi-antisense strand
auauguagagguuuccagauu

SEQ ID NO: 6364 - DNA, 21 bp, Homo sapiens
catattccatgtttggaagac

SEQ ID NO: 6365 - RNA, 21 nt, RNAi-sense strand
uauuccauguuuggaagacuu

SEQ ID NO: 6366 - RNA, 21 nt, RNAi-antisense strand
gucuuccaaacauggaauauu

SEQ ID NO: 6367 - DNA, 21 bp, Homo sapiens
catgaccatcctgccatcctt

SEQ ID NO: 6368 - RNA, 21 nt, RNAi-sense strand
ugaccauccugccauccuuuu

SEQ ID NO: 6369 - RNA, 21 nt, RNAi-antisense strand
aaggauggcaggauggucauu

SEQ ID NO: 6370 - DNA, 21 bp, Homo sapiens
catcctgccatccttgacttt

SEQ ID NO: 6371 - RNA, 21 nt, RNAi-sense strand
uccugccauccuugacuuuuu

SEQ ID NO: 6372 - RNA, 21 nt, RNAi-antisense strand
aaagucaaggauggcaggauu

SEQ ID NO: 6373 - DNA, 21 bp, Homo sapiens
catccttgactttgaactaat

SEQ ID NO: 6374 - RNA, 21 nt, RNAi-sense strand
uccuugacuuugaacuaauuu

SEQ ID NO: 6375 - RNA, 21 nt, RNAi-antisense strand
auuaguucaaagucaaggauu

SEQ ID NO: 6376 - DNA, 21 bp, Homo sapiens
catagttattatccagaggac

SEQ ID NO: 6377 - RNA, 21 nt, RNAi-sense strand
uaguuauuauccagaggacuu

SEQ ID NO: 6378 - RNA, 21 nt, RNAi-antisense strand
guccucuggauaauaacuauu

SEQ ID NO: 6379 - DNA, 21 bp, Homo sapiens
caactgaactgaactaatcct

SEQ ID NO: 6380 - RNA, 21 nt, RNAi-sense strand
acugaacugaacuaauccuuu

SEQ ID NO: 6381 - RNA, 21 nt, RNAi-antisense strand
aggauuaguucaguucaguuu

SEQ ID NO: 6382 - DNA, 21 bp, Homo sapiens
caaatcgtttatttcacacgc

SEQ ID NO: 6383 - RNA, 21 nt, RNAi-sense strand
aaucguuuauuucacacgcuu

SEQ ID NO: 6384 - RNA, 21 nt, RNAi-antisense strand
gcgugugaaauaaacgauuuu

SEQ ID NO: 6385 - DNA, 21 bp, Homo sapiens
cacacgctgttctaatggcac

SEQ ID NO: 6386 - RNA, 21 nt, RNAi-sense strand
cacgcuguucuaauggcacuu

SEQ ID NO: 6387 - RNA, 21 nt, RNAi-antisense strand
gugccauuagaacagcguguu

SEQ ID NO: 6388 - DNA, 21 bp, Homo sapiens
cacgctgttctaatggcactt

SEQ ID NO: 6389 - RNA, 21 nt, RNAi-sense strand
cgcuguucuaauggcacuuuu

SEQ ID NO: 6390 - RNA, 21 nt, RNAi-antisense strand
aagugccauuagaacagcguu

SEQ ID NO: 6391 - DNA, 21 bp, Homo sapiens
cattagaatcttaccttgtgc

SEQ ID NO: 6392 - RNA, 21 nt, RNAi-sense strand
uuagaaucuuaccuugugcuu

SEQ ID NO: 6393 - RNA, 21 nt, RNAi-antisense strand
gcacaagguaagauucuaauu

SEQ ID NO: 6394 - DNA, 21 bp, Homo sapiens
cagtcatcagaaattccagcg

SEQ ID NO: 6395 - RNA, 21 nt, RNAi-sense strand
gucaucagaaauuccagcguu

SEQ ID NO: 6396 - RNA, 21 nt, RNAi-antisense strand
cgcuggaauuucugaugacuu

SEQ ID NO: 6397 - DNA, 21 bp, Homo sapiens
catcagaaattccagcgtact

SEQ ID NO: 6398 - RNA, 21 nt, RNAi-sense strand
ucagaaauuccagcguacuuu

SEQ ID NO: 6399 - RNA, 21 nt, RNAi-antisense strand
aguacgcuggaauuucugauu

SEQ ID NO: 6400 - DNA, 21 bp, Homo sapiens
cagaaattccagcgtactata

SEQ ID NO: 6401 - RNA, 21 nt, RNAi-sense strand
gaaauuccagcguacuauauu

SEQ ID NO: 6402 - RNA, 21 nt, RNAi-antisense strand
uauaguacgcuggaauuucuu

SEQ ID NO: 6403 - DNA, 21 bp, Homo sapiens
cacactgttgtttagttaagt

SEQ ID NO: 6404 - RNA, 21 nt, RNAi-sense strand
cacuguuguuuaguuaaguuu

SEQ ID NO: 6405 - RNA, 21 nt, RNAi-antisense strand
acuuaacuaaacaacaguguu

SEQ ID NO: 6406 - DNA, 21 bp, Homo sapiens
caagaagtaaagatggaaacg

SEQ ID NO: 6407 - RNA, 21 nt, RNAi-sense strand
agaaguaaagauggaaacguu

SEQ ID NO: 6408 - RNA, 21 nt, RNAi-antisense strand
cguuuccaucuuuacuucuuu

SEQ ID NO: 6409 - DNA, 21 bp, Homo sapiens
gagctgcagtttcagccgcga

SEQ ID NO: 6410 - RNA, 21 nt, RNAi-sense strand
gcugcaguuucagccgcgauu

SEQ ID NO: 6411 - RNA, 21 nt, RNAi-antisense strand
ucgcggcugaaacugcagcuu

SEQ ID NO: 6412 - DNA, 21 bp, Homo sapiens
gacagcaagaacggcagagcc

SEQ ID NO: 6413 - RNA, 21 nt, RNAi-sense strand
cagcaagaacggcagagccuu

SEQ ID NO: 6414 - RNA, 21 nt, RNAi-antisense strand
ggcucugccguucuugcuguu

SEQ ID NO: 6415 - DNA, 21 bp, Homo sapiens
gaaggcgagcagagatatcct

SEQ ID NO: 6416 - RNA, 21 nt, RNAi-sense strand
aggcgagcagagauauccuuu

SEQ ID NO: 6417 - RNA, 21 nt, RNAi-antisense strand
aggauaucucugcucgccuuu

SEQ ID NO: 6418 - DNA, 21 bp, Homo sapiens
gagcagagatatcctctgaga

SEQ ID NO: 6419 - RNA, 21 nt, RNAi-sense strand
gcagagauauccucugagauu

SEQ ID NO: 6420 - RNA, 21 nt, RNAi-antisense strand
ucucagaggauaucucugcuu

SEQ ID NO: 6421 - DNA, 21 bp, Homo sapiens
gagatatcctctgagagccaa

SEQ ID NO: 6422 - RNA, 21 nt, RNAi-sense strand
gauauccucugagagccaauu

SEQ ID NO: 6423 - RNA, 21 nt, RNAi-antisense strand
uuggcucucagaggauaucuu

SEQ ID NO: 6424 - DNA, 21 bp, Homo sapiens
gatatcctctgagagccaagc

SEQ ID NO: 6425 - RNA, 21 nt, RNAi-sense strand
uauccucugagagccaagcuu

SEQ ID NO: 6426 - RNA, 21 nt, RNAi-antisense strand
gcuuggcucucagaggauauu

SEQ ID NO: 6427 - DNA, 21 bp, Homo sapiens
gagagccaagcaaagaacatt

SEQ ID NO: 6428 - RNA, 21 nt, RNAi-sense strand
gagccaagcaaagaacauuuu

SEQ ID NO: 6429 - RNA, 21 nt, RNAi-antisense strand
aauguucuuugcuuggcucuu

SEQ ID NO: 6430 - DNA, 21 bp, Homo sapiens
gagccaagcaaagaacattaa

SEQ ID NO: 6431 - RNA, 21 nt, RNAi-sense strand
gccaagcaaagaacauuaauu

SEQ ID NO: 6432 - RNA, 21 nt, RNAi-antisense strand
uuaauguucuuugcuuggcuu

SEQ ID NO: 6433 - DNA, 21 bp, Homo sapiens
gaacattaaggaaggaaggag

SEQ ID NO: 6434 - RNA, 21 nt, RNAi-sense strand
acauuaaggaaggaaggaguu

SEQ ID NO: 6435 - RNA, 21 nt, RNAi-antisense strand
cuccuuccuuccuuaauguuu

SEQ ID NO: 6436 - DNA, 21 bp, Homo sapiens
gaaggaaggaggaatgaggct

SEQ ID NO: 6437 - RNA, 21 nt, RNAi-sense strand
aggaaggaggaaugaggcuuu

SEQ ID NO: 6438 - RNA, 21 nt, RNAi-antisense strand
agccucauuccuccuuccuuu

SEQ ID NO: 6439 - DNA, 21 bp, Homo sapiens
gaaggaggaatgaggctggat

SEQ ID NO: 6440 - RNA, 21 nt, RNAi-sense strand
aggaggaaugaggcuggauuu

SEQ ID NO: 6441 - RNA, 21 nt, RNAi-antisense strand
auccagccucauuccuccuuu

SEQ ID NO: 6442 - DNA, 21 bp, Homo sapiens
gaggaatgaggctggatacgg

SEQ ID NO: 6443 - RNA, 21 nt, RNAi-sense strand
ggaaugaggcuggauacgguu

SEQ ID NO: 6444 - RNA, 21 nt, RNAi-antisense strand
ccguauccagccucauuccuu

SEQ ID NO: 6445 - DNA, 21 bp, Homo sapiens
gaatgaggctggatacggtgc

SEQ ID NO: 6446 - RNA, 21 nt, RNAi-sense strand
augaggcuggauacggugcuu

SEQ ID NO: 6447 - RNA, 21 nt, RNAi-antisense strand
gcaccguauccagccucauuu

SEQ ID NO: 6448 - DNA, 21 bp, Homo sapiens
gaggctggatacggtgcagtg

SEQ ID NO: 6449 - RNA, 21 nt, RNAi-sense strand
ggcuggauacggugcaguguu

SEQ ID NO: 6450 - RNA, 21 nt, RNAi-antisense strand
cacugcaccguauccagccuu

SEQ ID NO: 6451 - DNA, 21 bp, Homo sapiens
gactcgacggtgccatcagca

SEQ ID NO: 6452 - RNA, 21 nt, RNAi-sense strand
cucgacggugccaucagcauu

SEQ ID NO: 6453 - RNA, 21 nt, RNAi-antisense strand
ugcugauggcaccgucgaguu

SEQ ID NO: 6454 - DNA, 21 bp, Homo sapiens
gacggtgccatcagcatgaga

SEQ ID NO: 6455 - RNA, 21 nt, RNAi-sense strand
cggugccaucagcaugagauu

SEQ ID NO: 6456 - RNA, 21 nt, RNAi-antisense strand
ucucaugcugauggcaccguu

SEQ ID NO: 6457 - DNA, 21 bp, Homo sapiens
gagaacttaccgctacttctt

SEQ ID NO: 6458 - RNA, 21 nt, RNAi-sense strand
gaacuuaccgcuacuucuuuu

SEQ ID NO: 6459 - RNA, 21 nt, RNAi-antisense strand
aagaaguagcgguaaguucuu

SEQ ID NO: 6460 - DNA, 21 bp, Homo sapiens
gaacttaccgctacttcttgc

SEQ ID NO: 6461 - RNA, 21 nt, RNAi-sense strand
acuuaccgcuacuucuugcuu

SEQ ID NO: 6462 - RNA, 21 nt, RNAi-antisense strand
gcaagaaguagcgguaaguuu

SEQ ID NO: 6463 - DNA, 21 bp, Homo sapiens
gagctctctggaaacagcaaa

SEQ ID NO: 6464 - RNA, 21 nt, RNAi-sense strand
gcucucuggaaacagcaaauu

SEQ ID NO: 6465 - RNA, 21 nt, RNAi-antisense strand
uuugcuguuuccagagagcuu

SEQ ID NO: 6466 - DNA, 21 bp, Homo sapiens
gagctggatgtggaatcagtt

SEQ ID NO: 6467 - RNA, 21 nt, RNAi-sense strand
gcuggauguggaaucaguuuu

SEQ ID NO: 6468 - RNA, 21 nt, RNAi-antisense strand
aacugauuccacauccagcuu

SEQ ID NO: 6469 - DNA, 21 bp, Homo sapiens
gatgtggaatcagttctttct

SEQ ID NO: 6470 - RNA, 21 nt, RNAi-sense strand
uguggaaucaguucuuucuuu

SEQ ID NO: 6471 - RNA, 21 nt, RNAi-antisense strand
agaaagaacugauuccacauu

SEQ ID NO: 6472 - DNA, 21 bp, Homo sapiens
gaatcagttctttctcctgga

SEQ ID NO: 6473 - RNA, 21 nt, RNAi-sense strand
aucaguucuuucuccuggauu

SEQ ID NO: 6474 - RNA, 21 nt, RNAi-antisense strand
uccaggagaaagaacugauuu

SEQ ID NO: 6475 - DNA, 21 bp, Homo sapiens
gaggaatacacaggatccgat

SEQ ID NO: 6476 - RNA, 21 nt, RNAi-sense strand
ggaauacacaggauccgauuu

SEQ ID NO: 6477 - RNA, 21 nt, RNAi-antisense strand
aucggauccuguguauuccuu

SEQ ID NO: 6478 - DNA, 21 bp, Homo sapiens
gaatacacaggatccgattat

SEQ ID NO: 6479 - RNA, 21 nt, RNAi-sense strand
auacacaggauccgauuauuu

SEQ ID NO: 6480 - RNA, 21 nt, RNAi-antisense strand
auaaucggauccuguguauuu

SEQ ID NO: 6481 - DNA, 21 bp, Homo sapiens
gatccgattatcagtatgtgg

SEQ ID NO: 6482 - RNA, 21 nt, RNAi-sense strand
uccgauuaucaguaugugguu

SEQ ID NO: 6483 - RNA, 21 nt, RNAi-antisense strand
ccacauacugauaaucggauu

SEQ ID NO: 6484 - DNA, 21 bp, Homo sapiens
gaccaggatagaggagatgga

SEQ ID NO: 6485 - RNA, 21 nt, RNAi-sense strand
ccaggauagaggagauggauu

SEQ ID NO: 6486 - RNA, 21 nt, RNAi-antisense strand
uccaucuccucuauccugguu

SEQ ID NO: 6487 - DNA, 21 bp, Homo sapiens
gatagaggagatggatcactt

SEQ ID NO: 6488 - RNA, 21 nt, RNAi-sense strand
uagaggagauggaucacuuuu

SEQ ID NO: 6489 - RNA, 21 nt, RNAi-antisense strand
aagugauccaucuccucuauu

SEQ ID NO: 6490 - DNA, 21 bp, Homo sapiens
gaggagatggatcacttaaat

SEQ ID NO: 6491 - RNA, 21 nt, RNAi-sense strand
ggagauggaucacuuaaauuu

SEQ ID NO: 6492 - RNA, 21 nt, RNAi-antisense strand
auuuaagugauccaucuccuu

SEQ ID NO: 6493 - DNA, 21 bp, Homo sapiens
gagatggagcaggagatctct

SEQ ID NO: 6494 - RNA, 21 nt, RNAi-sense strand
gauggagcaggagaucucuuu

SEQ ID NO: 6495 - RNA, 21 nt, RNAi-antisense strand
agagaucuccugcuccaucuu

SEQ ID NO: 6496 - DNA, 21 bp, Homo sapiens
gatggagcaggagatctcttc

SEQ ID NO: 6497 - RNA, 21 nt, RNAi-sense strand
uggagcaggagaucucuucuu

SEQ ID NO: 6498 - RNA, 21 nt, RNAi-antisense strand
gaagagaucuccugcuccauu

SEQ ID NO: 6499 - DNA, 21 bp, Homo sapiens
gagcaggagatctcttcatta

SEQ ID NO: 6500 - RNA, 21 nt, RNAi-sense strand
gcaggagaucucuucauuauu

SEQ ID NO: 6501 - RNA, 21 nt, RNAi-antisense strand
uaaugaagagaucuccugcuu

SEQ ID NO: 6502 - DNA, 21 bp, Homo sapiens
gacatacaggccaccaagagg

SEQ ID NO: 6503 - RNA, 21 nt, RNAi-sense strand
cauacaggccaccaagagguu

SEQ ID NO: 6504 - RNA, 21 nt, RNAi-antisense strand
ccucuugguggccuguauguu

SEQ ID NO: 6505 - DNA, 21 bp, Homo sapiens
gagctcaagctataaacagaa

SEQ ID NO: 6506 - RNA, 21 nt, RNAi-sense strand
gcucaagcuauaaacagaauu

SEQ ID NO: 6507 - RNA, 21 nt, RNAi-antisense strand
uucuguuuauagcuugagcuu

SEQ ID NO: 6508 - DNA, 21 bp, Homo sapiens
gagtctgaattcatcatcaag

SEQ ID NO: 6509 - RNA, 21 nt, RNAi-sense strand
gucugaauucaucaucaaguu

SEQ ID NO: 6510 - RNA, 21 nt, RNAi-antisense strand
cuugaugaugaauucagacuu

SEQ ID NO: 6511 - DNA, 21 bp, Homo sapiens
gaattcatcatcaagatccat

SEQ ID NO: 6512 - RNA, 21 nt, RNAi-sense strand
auucaucaucaagauccauuu

SEQ ID NO: 6513 - RNA, 21 nt, RNAi-antisense strand
auggaucuugaugaugaauuu

SEQ ID NO: 6514 - DNA, 21 bp, Homo sapiens
gatccatgacatcaatgacaa

SEQ ID NO: 6515 - RNA, 21 nt, RNAi-sense strand
uccaugacaucaaugacaauu

SEQ ID NO: 6516 - RNA, 21 nt, RNAi-antisense strand
uugucauugaugucauggauu

SEQ ID NO: 6517 - DNA, 21 bp, Homo sapiens
gacatcaatgacaatgaacca

SEQ ID NO: 6518 - RNA, 21 nt, RNAi-sense strand
caucaaugacaaugaaccauu

SEQ ID NO: 6519 - RNA, 21 nt, RNAi-antisense strand
ugguucauugucauugauguu

SEQ ID NO: 6520 - DNA, 21 bp, Homo sapiens
gacaatgaaccaatattcacc

SEQ ID NO: 6521 - RNA, 21 nt, RNAi-sense strand
caaugaaccaauauucaccuu

SEQ ID NO: 6522 - RNA, 21 nt, RNAi-antisense strand
ggugaauauugguucauuguu

SEQ ID NO: 6523 - DNA, 21 bp, Homo sapiens
gaaccaatattcaccaaggag

SEQ ID NO: 6524 - RNA, 21 nt, RNAi-sense strand
accaauauucaccaaggaguu

SEQ ID NO: 6525 - RNA, 21 nt, RNAi-antisense strand
cuccuuggugaauauugguuu

SEQ ID NO: 6526 - DNA, 21 bp, Homo sapiens
gaggtttacacagccactgtc

SEQ ID NO: 6527 - RNA, 21 nt, RNAi-sense strand
gguuuacacagccacugucuu

SEQ ID NO: 6528 - RNA, 21 nt, RNAi-antisense strand
gacaguggcuguguaaaccuu

SEQ ID NO: 6529 - DNA, 21 bp, Homo sapiens
gaaatgtctgatgtcggtaca

SEQ ID NO: 6530 - RNA, 21 nt, RNAi-sense strand
aaugucugaugucgguacauu

SEQ ID NO: 6531 - RNA, 21 nt, RNAi-antisense strand
uguaccgacaucagacauuuu

SEQ ID NO: 6532 - DNA, 21 bp, Homo sapiens
gatgtcggtacatttgttgtc

SEQ ID NO: 6533 - RNA, 21 nt, RNAi-sense strand
ugucgguacauuuguugucuu

SEQ ID NO: 6534 - RNA, 21 nt, RNAi-antisense strand
gacaacaaauguaccgacauu

SEQ ID NO: 6535 - DNA, 21 bp, Homo sapiens
gacggatgcagatgatccaac

SEQ ID NO: 6536 - RNA, 21 nt, RNAi-sense strand
cggaugcagaugauccaacuu

SEQ ID NO: 6537 - RNA, 21 nt, RNAi-antisense strand
guuggaucaucugcauccguu

SEQ ID NO: 6538 - DNA, 21 bp, Homo sapiens
gatgcagatgatccaacatat

SEQ ID NO: 6539 - RNA, 21 nt, RNAi-sense strand
ugcagaugauccaacauauuu

SEQ ID NO: 6540 - RNA, 21 nt, RNAi-antisense strand
auauguuggaucaucugcauu

SEQ ID NO: 6541 - DNA, 21 bp, Homo sapiens
gaacagtgctaaagttgtcta

SEQ ID NO: 6542 - RNA, 21 nt, RNAi-sense strand
acagugcuaaaguugucuauu

SEQ ID NO: 6543 - RNA, 21 nt, RNAi-antisense strand
uagacaacuuuagcacuguuu

SEQ ID NO: 6544 - DNA, 21 bp, Homo sapiens
gaatcagaaacaggtattatc

SEQ ID NO: 6545 - RNA, 21 nt, RNAi-sense strand
aucagaaacagguauuaucuu

SEQ ID NO: 6546 - RNA, 21 nt, RNAi-antisense strand
gauaauaccuguuucugauuu

SEQ ID NO: 6547 - DNA, 21 bp, Homo sapiens
gaaacaggtattatcaagaca

SEQ ID NO: 6548 - RNA, 21 nt, RNAi-sense strand
aacagguauuaucaagacauu

SEQ ID NO: 6549 - RNA, 21 nt, RNAi-antisense strand
ugucuugauaauaccuguuuu

SEQ ID NO: 6550 - DNA, 21 bp, Homo sapiens
gacagctttgctcaacatgga

SEQ ID NO: 6551 - RNA, 21 nt, RNAi-sense strand
cagcuuugcucaacauggauu

SEQ ID NO: 6552 - RNA, 21 nt, RNAi-antisense strand
uccauguugagcaaagcuguu

SEQ ID NO: 6553 - DNA, 21 bp, Homo sapiens
gagcagtaccaagtggtgatt

SEQ ID NO: 6554 - RNA, 21 nt, RNAi-sense strand
gcaguaccaaguggugauuuu

SEQ ID NO: 6555 - RNA, 21 nt, RNAi-antisense strand
aaucaccacuugguacugcuu

SEQ ID NO: 6556 - DNA, 21 bp, Homo sapiens
gaccaccaccgtgaacatcac

SEQ ID NO: 6557 - RNA, 21 nt, RNAi-sense strand
ccaccaccgugaacaucacuu

SEQ ID NO: 6558 - RNA, 21 nt, RNAi-antisense strand
gugauguucacgguggugguu

SEQ ID NO: 6559 - DNA, 21 bp, Homo sapiens
gaacatcacactgactgatgt

SEQ ID NO: 6560 - RNA, 21 nt, RNAi-sense strand
acaucacacugacugauguuu

SEQ ID NO: 6561 - RNA, 21 nt, RNAi-antisense strand
acaucagucagugugauguuu

SEQ ID NO: 6562 - DNA, 21 bp, Homo sapiens
gacaccaattggcagaatcaa

SEQ ID NO: 6563 - RNA, 21 nt, RNAi-sense strand
caccaauuggcagaaucaauu

SEQ ID NO: 6564 - RNA, 21 nt, RNAi-antisense strand
uugauucugccaauugguguu

SEQ ID NO: 6565 - DNA, 21 bp, Homo sapiens
gaatcaaagccagcgacgctg

SEQ ID NO: 6566 - RNA, 21 nt, RNAi-sense strand
aucaaagccagcgacgcuguu

SEQ ID NO: 6567 - RNA, 21 nt, RNAi-antisense strand
cagcgucgcuggcuuugauuu

SEQ ID NO: 6568 - DNA, 21 bp, Homo sapiens
gaaattgagtacagcatcaca

SEQ ID NO: 6569 - RNA, 21 nt, RNAi-sense strand
aauugaguacagcaucacauu

SEQ ID NO: 6570 - RNA, 21 nt, RNAi-antisense strand
ugugaugcuguacucaauuuu

SEQ ID NO: 6571 - DNA, 21 bp, Homo sapiens
gagtacagcatcacagacggt

SEQ ID NO: 6572 - RNA, 21 nt, RNAi-sense strand
guacagcaucacagacgguuu

SEQ ID NO: 6573 - RNA, 21 nt, RNAi-antisense strand
accgucugugaugcuguacuu

SEQ ID NO: 6574 - DNA, 21 bp, Homo sapiens
gatatgtttgatgtcatcacc

SEQ ID NO: 6575 - RNA, 21 nt, RNAi-sense strand
uauguuugaugucaucaccuu

SEQ ID NO: 6576 - RNA, 21 nt, RNAi-antisense strand
ggugaugacaucaaacauauu

SEQ ID NO: 6577 - DNA, 21 bp, Homo sapiens
gatgtcatcaccgaccaggaa

SEQ ID NO: 6578 - RNA, 21 nt, RNAi-sense strand
ugucaucaccgaccaggaauu

SEQ ID NO: 6579 - RNA, 21 nt, RNAi-antisense strand
uuccuggucggugaugacauu

SEQ ID NO: 6580 - DNA, 21 bp, Homo sapiens
gaagcctccaatccttatgtt

SEQ ID NO: 6581 - RNA, 21 nt, RNAi-sense strand
agccuccaauccuuauguuuu

SEQ ID NO: 6582 - RNA, 21 nt, RNAi-antisense strand
aacauaaggauuggaggcuuu

SEQ ID NO: 6583 - DNA, 21 bp, Homo sapiens
gagccacgatttctctacttg

SEQ ID NO: 6584 - RNA, 21 nt, RNAi-sense strand
gccacgauuucucuacuuguu

SEQ ID NO: 6585 - RNA, 21 nt, RNAi-antisense strand
caaguagagaaaucguggcuu

SEQ ID NO: 6586 - DNA, 21 bp, Homo sapiens
gattcagccacggttagaatt

SEQ ID NO: 6587 - RNA, 21 nt, RNAi-sense strand
uucagccacgguuagaauuuu

SEQ ID NO: 6588 - RNA, 21 nt, RNAi-antisense strand
aauucuaaccguggcugaauu

SEQ ID NO: 6589 - DNA, 21 bp, Homo sapiens
gaattgtggtggaggatgtag

SEQ ID NO: 6590 - RNA, 21 nt, RNAi-sense strand
auugugguggaggauguaguu

SEQ ID NO: 6591 - RNA, 21 nt, RNAi-antisense strand
cuacauccuccaccacaauuu

SEQ ID NO: 6592 - DNA, 21 bp, Homo sapiens
gaggatgtagatgagccacct

SEQ ID NO: 6593 - RNA, 21 nt, RNAi-sense strand
ggauguagaugagccaccuuu

SEQ ID NO: 6594 - RNA, 21 nt, RNAi-antisense strand
agguggcucaucuacauccuu

SEQ ID NO: 6595 - DNA, 21 bp, Homo sapiens
gatgtagatgagccacctgtc

SEQ ID NO: 6596 - RNA, 21 nt, RNAi-sense strand
uguagaugagccaccugucuu

SEQ ID NO: 6597 - RNA, 21 nt, RNAi-antisense strand
gacagguggcucaucuacauu

SEQ ID NO: 6598 - DNA, 21 bp, Homo sapiens
gatgagccacctgtcttcagc

SEQ ID NO: 6599 - RNA, 21 nt, RNAi-sense strand
ugagccaccugucuucagcuu

SEQ ID NO: 6600 - RNA, 21 nt, RNAi-antisense strand
gcugaagacagguggcucauu

SEQ ID NO: 6601 - DNA, 21 bp, Homo sapiens
gagccacctgtcttcagcaaa

SEQ ID NO: 6602 - RNA, 21 nt, RNAi-sense strand
gccaccugucuucagcaaauu

SEQ ID NO: 6603 - RNA, 21 nt, RNAi-antisense strand
uuugcugaagacagguggcuu

SEQ ID NO: 6604 - DNA, 21 bp, Homo sapiens
gagaagatgctcagataaaca

SEQ ID NO: 6605 - RNA, 21 nt, RNAi-sense strand
gaagaugcucagauaaacauu

SEQ ID NO: 6606 - RNA, 21 nt, RNAi-antisense strand
uguuuaucugagcaucuucuu

SEQ ID NO: 6607 - DNA, 21 bp, Homo sapiens
gaagatgctcagataaacacc

SEQ ID NO: 6608 - RNA, 21 nt, RNAi-sense strand
agaugcucagauaaacaccuu

SEQ ID NO: 6609 - RNA, 21 nt, RNAi-antisense strand
gguguuuaucugagcaucuuu

SEQ ID NO: 6610 - DNA, 21 bp, Homo sapiens
gatgctcagataaacaccaca

SEQ ID NO: 6611 - RNA, 21 nt, RNAi-sense strand
ugcucagauaaacaccacauu

SEQ ID NO: 6612 - RNA, 21 nt, RNAi-antisense strand
ugugguguuuaucugagcauu

SEQ ID NO: 6613 - DNA, 21 bp, Homo sapiens
gataaacaccacaataggctc

SEQ ID NO: 6614 - RNA, 21 nt, RNAi-sense strand
uaaacaccacaauaggcucuu

SEQ ID NO: 6615 - RNA, 21 nt, RNAi-antisense strand
gagccuauugugguguuuauu

SEQ ID NO: 6616 - DNA, 21 bp, Homo sapiens
gatccagatgctgccaggaat

SEQ ID NO: 6617 - RNA, 21 nt, RNAi-sense strand
uccagaugcugccaggaauuu

SEQ ID NO: 6618 - RNA, 21 nt, RNAi-antisense strand
auuccuggcagcaucuggauu

SEQ ID NO: 6619 - DNA, 21 bp, Homo sapiens
gatgctgccaggaatcctgtc

SEQ ID NO: 6620 - RNA, 21 nt, RNAi-sense strand
ugcugccaggaauccugucuu

SEQ ID NO: 6621 - RNA, 21 nt, RNAi-antisense strand
gacaggauuccuggcagcauu

SEQ ID NO: 6622 - DNA, 21 bp, Homo sapiens
gaatcctgtcaagtactctgt

SEQ ID NO: 6623 - RNA, 21 nt, RNAi-sense strand
auccugucaaguacucuguuu

SEQ ID NO: 6624 - RNA, 21 nt, RNAi-antisense strand
acagaguacuugacaggauuu

SEQ ID NO: 6625 - DNA, 21 bp, Homo sapiens
gatcgacacacagatatggac

SEQ ID NO: 6626 - RNA, 21 nt, RNAi-sense strand
ucgacacacagauauggacuu

SEQ ID NO: 6627 - RNA, 21 nt, RNAi-antisense strand
guccauaucugugugucgauu

SEQ ID NO: 6628 - DNA, 21 bp, Homo sapiens
gacacacagatatggacagaa

SEQ ID NO: 6629 - RNA, 21 nt, RNAi-sense strand
cacacagauauggacagaauu

SEQ ID NO: 6630 - RNA, 21 nt, RNAi-antisense strand
uucuguccauaucuguguguu

SEQ ID NO: 6631 - DNA, 21 bp, Homo sapiens
gatatggacagaatattcaac

SEQ ID NO: 6632 - RNA, 21 nt, RNAi-sense strand
uauggacagaauauucaacuu

SEQ ID NO: 6633 - RNA, 21 nt, RNAi-antisense strand
guugaauauucuguccauauu

SEQ ID NO: 6634 - DNA, 21 bp, Homo sapiens
gattctggaaatggttcgatt

SEQ ID NO: 6635 - RNA, 21 nt, RNAi-sense strand
uucuggaaaugguucgauuuu

SEQ ID NO: 6636 - RNA, 21 nt, RNAi-antisense strand
aaucgaaccauuuccagaauu

SEQ ID NO: 6637 - DNA, 21 bp, Homo sapiens
gaaacttcttgaccgagaaac

SEQ ID NO: 6638 - RNA, 21 nt, RNAi-sense strand
aacuucuugaccgagaaacuu

SEQ ID NO: 6639 - RNA, 21 nt, RNAi-antisense strand
guuucucggucaagaaguuuu

SEQ ID NO: 6640 - DNA, 21 bp, Homo sapiens
gaccgagaaacactgctatgg

SEQ ID NO: 6641 - RNA, 21 nt, RNAi-sense strand
ccgagaaacacugcuaugguu

SEQ ID NO: 6642 - RNA, 21 nt, RNAi-antisense strand
ccauagcaguguuucucgguu

SEQ ID NO: 6643 - DNA, 21 bp, Homo sapiens
gagaaacactgctatggcaca

SEQ ID NO: 6644 - RNA, 21 nt, RNAi-sense strand
gaaacacugcuauggcacauu

SEQ ID NO: 6645 - RNA, 21 nt, RNAi-antisense strand
ugugccauagcaguguuucuu

SEQ ID NO: 6646 - DNA, 21 bp, Homo sapiens
gaaacactgctatggcacaac

SEQ ID NO: 6647 - RNA, 21 nt, RNAi-sense strand
aacacugcuauggcacaacuu

SEQ ID NO: 6648 - RNA, 21 nt, RNAi-antisense strand
guugugccauagcaguguuuu

SEQ ID NO: 6649 - DNA, 21 bp, Homo sapiens
gatagcaacagagatcaataa

SEQ ID NO: 6650 - RNA, 21 nt, RNAi-sense strand
uagcaacagagaucaauaauu

SEQ ID NO: 6651 - RNA, 21 nt, RNAi-antisense strand
uuauugaucucuguugcuauu

SEQ ID NO: 6652 - DNA, 21 bp, Homo sapiens
gagatcaataatccaaagcaa

SEQ ID NO: 6653 - RNA, 21 nt, RNAi-sense strand
gaucaauaauccaaagcaauu

SEQ ID NO: 6654 - RNA, 21 nt, RNAi-antisense strand
uugcuuuggauuauugaucuu

SEQ ID NO: 6655 - DNA, 21 bp, Homo sapiens
gatcaataatccaaagcaaag

SEQ ID NO: 6656 - RNA, 21 nt, RNAi-sense strand
ucaauaauccaaagcaaaguu

SEQ ID NO: 6657 - RNA, 21 nt, RNAi-antisense strand
cuuugcuuuggauuauugauu

SEQ ID NO: 6658 - DNA, 21 bp, Homo sapiens
gaatttgctgagttctatgaa

SEQ ID NO: 6659 - RNA, 21 nt, RNAi-sense strand
auuugcugaguucuaugaauu

SEQ ID NO: 6660 - RNA, 21 nt, RNAi-antisense strand
uucauagaacucagcaaauuu

SEQ ID NO: 6661 - DNA, 21 bp, Homo sapiens
gaagcagccagtggctcaaac

SEQ ID NO: 6662 - RNA, 21 nt, RNAi-sense strand
agcagccaguggcucaaacuu

SEQ ID NO: 6663 - RNA, 21 nt, RNAi-antisense strand
guuugagccacuggcugcuuu

SEQ ID NO: 6664 - DNA, 21 bp, Homo sapiens
gacaacaaagacaacacggcg

SEQ ID NO: 6665 - RNA, 21 nt, RNAi-sense strand
caacaaagacaacacggcguu

SEQ ID NO: 6666 - RNA, 21 nt, RNAi-antisense strand
cgccguguugucuuuguuguu

SEQ ID NO: 6667 - DNA, 21 bp, Homo sapiens
gacacgagatgagcacctatc

SEQ ID NO: 6668 - RNA, 21 nt, RNAi-sense strand
cacgagaugagcaccuaucuu

SEQ ID NO: 6669 - RNA, 21 nt, RNAi-antisense strand
gauaggugcucaucucguguu

SEQ ID NO: 6670 - DNA, 21 bp, Homo sapiens
gagatgagcacctatctcttg

SEQ ID NO: 6671 - RNA, 21 nt, RNAi-sense strand
gaugagcaccuaucucuuguu

SEQ ID NO: 6672 - RNA, 21 nt, RNAi-antisense strand
caagagauaggugcucaucuu

SEQ ID NO: 6673 - DNA, 21 bp, Homo sapiens
gatgagcacctatctcttgcc

SEQ ID NO: 6674 - RNA, 21 nt, RNAi-sense strand
ugagcaccuaucucuugccuu

SEQ ID NO: 6675 - RNA, 21 nt, RNAi-antisense strand
ggcaagagauaggugcucauu

SEQ ID NO: 6676 - DNA, 21 bp, Homo sapiens
gagcacctatctcttgcctgt

SEQ ID NO: 6677 - RNA, 21 nt, RNAi-sense strand
gcaccuaucucuugccuguuu

SEQ ID NO: 6678 - RNA, 21 nt, RNAi-antisense strand
acaggcaagagauaggugcuu

SEQ ID NO: 6679 - DNA, 21 bp, Homo sapiens
gaacatgcaatcctgccatgc

SEQ ID NO: 6680 - RNA, 21 nt, RNAi-sense strand
acaugcaauccugccaugcuu

SEQ ID NO: 6681 - RNA, 21 nt, RNAi-antisense strand
gcauggcaggauugcauguuu

SEQ ID NO: 6682 - DNA, 21 bp, Homo sapiens
gatcctactagtgacagtggt

SEQ ID NO: 6683 - RNA, 21 nt, RNAi-sense strand
uccuacuagugacagugguuu

SEQ ID NO: 6684 - RNA, 21 nt, RNAi-antisense strand
accacugucacuaguaggauu

SEQ ID NO: 6685 - DNA, 21 bp, Homo sapiens
gacagtggtgctgtttgcagc

SEQ ID NO: 6686 - RNA, 21 nt, RNAi-sense strand
caguggugcuguuugcagcuu

SEQ ID NO: 6687 - RNA, 21 nt, RNAi-antisense strand
gcugcaaacagcaccacuguu

SEQ ID NO: 6688 - DNA, 21 bp, Homo sapiens
gagcctttgatcatttccaaa

SEQ ID NO: 6689 - RNA, 21 nt, RNAi-sense strand
gccuuugaucauuuccaaauu

SEQ ID NO: 6690 - RNA, 21 nt, RNAi-antisense strand
uuuggaaaugaucaaaggcuu

SEQ ID NO: 6691 - DNA, 21 bp, Homo sapiens
gatcatttccaaagaggacat

SEQ ID NO: 6692 - RNA, 21 nt, RNAi-sense strand
ucauuuccaaagaggacauuu

SEQ ID NO: 6693 - RNA, 21 nt, RNAi-antisense strand
auguccucuuuggaaaugauu

SEQ ID NO: 6694 - DNA, 21 bp, Homo sapiens
gaggacatcagagataacatt

SEQ ID NO: 6695 - RNA, 21 nt, RNAi-sense strand
ggacaucagagauaacauuuu

SEQ ID NO: 6696 - RNA, 21 nt, RNAi-antisense strand
aauguuaucucugauguccuu

SEQ ID NO: 6697 - DNA, 21 bp, Homo sapiens
gacatcagagataacattgtc

SEQ ID NO: 6698 - RNA, 21 nt, RNAi-sense strand
caucagagauaacauugucuu

SEQ ID NO: 6699 - RNA, 21 nt, RNAi-antisense strand
gacaauguuaucucugauguu

SEQ ID NO: 6700 - DNA, 21 bp, Homo sapiens
gagataacattgtcagttaca

SEQ ID NO: 6701 - RNA, 21 nt, RNAi-sense strand
gauaacauugucaguuacauu

SEQ ID NO: 6702 - RNA, 21 nt, RNAi-antisense strand
uguaacugacaauguuaucuu

SEQ ID NO: 6703 - DNA, 21 bp, Homo sapiens
gataacattgtcagttacaac

SEQ ID NO: 6704 - RNA, 21 nt, RNAi-sense strand
uaacauugucaguuacaacuu

SEQ ID NO: 6705 - RNA, 21 nt, RNAi-antisense strand
guuguaacugacaauguuauu

SEQ ID NO: 6706 - DNA, 21 bp, Homo sapiens
gacgaaggtggtggagaggag

SEQ ID NO: 6707 - RNA, 21 nt, RNAi-sense strand
cgaaggugguggagaggaguu

SEQ ID NO: 6708 - RNA, 21 nt, RNAi-antisense strand
cuccucuccaccaccuucguu

SEQ ID NO: 6709 - DNA, 21 bp, Homo sapiens
gaaggtggtggagaggaggac

SEQ ID NO: 6710 - RNA, 21 nt, RNAi-sense strand
aggugguggagaggaggacuu

SEQ ID NO: 6711 - RNA, 21 nt, RNAi-antisense strand
guccuccucuccaccaccuuu

SEQ ID NO: 6712 - DNA, 21 bp, Homo sapiens
gaggaatcctgaagccataga

SEQ ID NO: 6713 - RNA, 21 nt, RNAi-sense strand
ggaauccugaagccauagauu

SEQ ID NO: 6714 - RNA, 21 nt, RNAi-antisense strand
ucuauggcuucaggauuccuu

SEQ ID NO: 6715 - DNA, 21 bp, Homo sapiens
gaatcctgaagccatagagga

SEQ ID NO: 6716 - RNA, 21 nt, RNAi-sense strand
auccugaagccauagaggauu

SEQ ID NO: 6717 - RNA, 21 nt, RNAi-antisense strand
uccucuauggcuucaggauuu

SEQ ID NO: 6718 - DNA, 21 bp, Homo sapiens
gaagccatagaggacaacaaa

SEQ ID NO: 6719 - RNA, 21 nt, RNAi-sense strand
agccauagaggacaacaaauu

SEQ ID NO: 6720 - RNA, 21 nt, RNAi-antisense strand
uuuguuguccucuauggcuuu

SEQ ID NO: 6721 - DNA, 21 bp, Homo sapiens
gaggacaacaaattacgaagg

SEQ ID NO: 6722 - RNA, 21 nt, RNAi-sense strand
ggacaacaaauuacgaagguu

SEQ ID NO: 6723 - RNA, 21 nt, RNAi-antisense strand
ccuucguaauuuguuguccuu

SEQ ID NO: 6724 - DNA, 21 bp, Homo sapiens
gactccaacagctcgcgacaa

SEQ ID NO: 6725 - RNA, 21 nt, RNAi-sense strand
cuccaacagcucgcgacaauu

SEQ ID NO: 6726 - RNA, 21 nt, RNAi-antisense strand
uugucgcgagcuguuggaguu

SEQ ID NO: 6727 - DNA, 21 bp, Homo sapiens
gacaacaccgatgtcagagat

SEQ ID NO: 6728 - RNA, 21 nt, RNAi-sense strand
caacaccgaugucagagauuu

SEQ ID NO: 6729 - RNA, 21 nt, RNAi-antisense strand
aucucugacaucgguguuguu

SEQ ID NO: 6730 - DNA, 21 bp, Homo sapiens
gatgtcagagatttcattaac

SEQ ID NO: 6731 - RNA, 21 nt, RNAi-sense strand
ugucagagauuucauuaacuu

SEQ ID NO: 6732 - RNA, 21 nt, RNAi-antisense strand
guuaaugaaaucucugacauu

SEQ ID NO: 6733 - DNA, 21 bp, Homo sapiens
gagatttcattaaccaaaggt

SEQ ID NO: 6734 - RNA, 21 nt, RNAi-sense strand
gauuucauuaaccaaagguuu

SEQ ID NO: 6735 - RNA, 21 nt, RNAi-antisense strand
accuuugguuaaugaaaucuu

SEQ ID NO: 6736 - DNA, 21 bp, Homo sapiens
gactccttggccacttacgcc

SEQ ID NO: 6737 - RNA, 21 nt, RNAi-sense strand
cuccuuggccacuuacgccuu

SEQ ID NO: 6738 - RNA, 21 nt, RNAi-antisense strand
ggcguaaguggccaaggaguu

SEQ ID NO: 6739 - DNA, 21 bp, Homo sapiens
gagctcgctggagtcagtgac

SEQ ID NO: 6740 - RNA, 21 nt, RNAi-sense strand
gcucgcuggagucagugacuu

SEQ ID NO: 6741 - RNA, 21 nt, RNAi-antisense strand
gucacugacuccagcgagcuu

SEQ ID NO: 6742 - DNA, 21 bp, Homo sapiens
gagtcagtgaccacggatgca

SEQ ID NO: 6743 - RNA, 21 nt, RNAi-sense strand
gucagugaccacggaugcauu

SEQ ID NO: 6744 - RNA, 21 nt, RNAi-antisense strand
ugcauccguggucacugacuu

SEQ ID NO: 6745 - DNA, 21 bp, Homo sapiens
gaccacggatgcagatcaaga

SEQ ID NO: 6746 - RNA, 21 nt, RNAi-sense strand
ccacggaugcagaucaagauu

SEQ ID NO: 6747 - RNA, 21 nt, RNAi-antisense strand
ucuugaucugcauccgugguu

SEQ ID NO: 6748 - DNA, 21 bp, Homo sapiens
gatgcagatcaagactatgat

SEQ ID NO: 6749 - RNA, 21 nt, RNAi-sense strand
ugcagaucaagacuaugauuu

SEQ ID NO: 6750 - RNA, 21 nt, RNAi-antisense strand
aucauagucuugaucugcauu

SEQ ID NO: 6751 - DNA, 21 bp, Homo sapiens
gatcaagactatgattacctt

SEQ ID NO: 6752 - RNA, 21 nt, RNAi-sense strand
ucaagacuaugauuaccuuuu

SEQ ID NO: 6753 - RNA, 21 nt, RNAi-antisense strand
aagguaaucauagucuugauu

SEQ ID NO: 6754 - DNA, 21 bp, Homo sapiens
gactatgattaccttagtgac

SEQ ID NO: 6755 - RNA, 21 nt, RNAi-sense strand
cuaugauuaccuuagugacuu

SEQ ID NO: 6756 - RNA, 21 nt, RNAi-antisense strand
gucacuaagguaaucauaguu

SEQ ID NO: 6757 - DNA, 21 bp, Homo sapiens
gatatgtatggaggagtggac

SEQ ID NO: 6758 - RNA, 21 nt, RNAi-sense strand
uauguauggaggaguggacuu

SEQ ID NO: 6759 - RNA, 21 nt, RNAi-antisense strand
guccacuccuccauacauauu

SEQ ID NO: 6760 - DNA, 21 bp, Homo sapiens
gaggagtggacagtgacaaag

SEQ ID NO: 6761 - RNA, 21 nt, RNAi-sense strand
ggaguggacagugacaaaguu

SEQ ID NO: 6762 - RNA, 21 nt, RNAi-antisense strand
cuuugucacuguccacuccuu

SEQ ID NO: 6763 - DNA, 21 bp, Homo sapiens
gagtggacagtgacaaagact

SEQ ID NO: 6764 - RNA, 21 nt, RNAi-sense strand
guggacagugacaaagacuuu

SEQ ID NO: 6765 - RNA, 21 nt, RNAi-antisense strand
agucuuugucacuguccacuu

SEQ ID NO: 6766 - DNA, 21 bp, Homo sapiens
gacagtgacaaagactcctaa

SEQ ID NO: 6767 - RNA, 21 nt, RNAi-sense strand
cagugacaaagacuccuaauu

SEQ ID NO: 6768 - RNA, 21 nt, RNAi-antisense strand
uuaggagucuuugucacuguu

SEQ ID NO: 6769 - DNA, 21 bp, Homo sapiens
gacaaagactcctaatctgtt

SEQ ID NO: 6770 - RNA, 21 nt, RNAi-sense strand
caaagacuccuaaucuguuuu

SEQ ID NO: 6771 - RNA, 21 nt, RNAi-antisense strand
aacagauuaggagucuuuguu

SEQ ID NO: 6772 - DNA, 21 bp, Homo sapiens
gactcctaatctgttgccttt

SEQ ID NO: 6773 - RNA, 21 nt, RNAi-sense strand
cuccuaaucuguugccuuuuu

SEQ ID NO: 6774 - RNA, 21 nt, RNAi-antisense strand
aaaggcaacagauuaggaguu

SEQ ID NO: 6775 - DNA, 21 bp, Homo sapiens
gacactgaaatatgtgaagtg

SEQ ID NO: 6776 - RNA, 21 nt, RNAi-sense strand
cacugaaauaugugaaguguu

SEQ ID NO: 6777 - RNA, 21 nt, RNAi-antisense strand
cacuucacauauuucaguguu

SEQ ID NO: 6778 - DNA, 21 bp, Homo sapiens
gaaatatgtgaagtggctatt

SEQ ID NO: 6779 - RNA, 21 nt, RNAi-sense strand
aauaugugaaguggcuauuuu

SEQ ID NO: 6780 - RNA, 21 nt, RNAi-antisense strand
aauagccacuucacauauuuu

SEQ ID NO: 6781 - DNA, 21 bp, Homo sapiens
gaacagtatttccacttgttc

SEQ ID NO: 6782 - RNA, 21 nt, RNAi-sense strand
acaguauuuccacuuguucuu

SEQ ID NO: 6783 - RNA, 21 nt, RNAi-antisense strand
gaacaaguggaaauacuguuu

SEQ ID NO: 6784 - DNA, 21 bp, Homo sapiens
gataaaggactgtgctttaaa

SEQ ID NO: 6785 - RNA, 21 nt, RNAi-sense strand
uaaaggacugugcuuuaaauu

SEQ ID NO: 6786 - RNA, 21 nt, RNAi-antisense strand
uuuaaagcacaguccuuuauu

SEQ ID NO: 6787 - DNA, 21 bp, Homo sapiens
gaactttctctgccatcaact

SEQ ID NO: 6788 - RNA, 21 nt, RNAi-sense strand
acuuucucugccaucaacuuu

SEQ ID NO: 6789 - RNA, 21 nt, RNAi-antisense strand
aguugauggcagagaaaguuu

SEQ ID NO: 6790 - DNA, 21 bp, Homo sapiens
gaatagaagcaaattaaacgg

SEQ ID NO: 6791 - RNA, 21 nt, RNAi-sense strand
auagaagcaaauuaaacgguu

SEQ ID NO: 6792 - RNA, 21 nt, RNAi-antisense strand
ccguuuaauuugcuucuauuu

SEQ ID NO: 6793 - DNA, 21 bp, Homo sapiens
gaagcaaattaaacggtaaca

SEQ ID NO: 6794 - RNA, 21 nt, RNAi-sense strand
agcaaauuaaacgguaacauu

SEQ ID NO: 6795 - RNA, 21 nt, RNAi-antisense strand
uguuaccguuuaauuugcuuu

SEQ ID NO: 6796 - DNA, 21 bp, Homo sapiens
gacttcattccttccactaac

SEQ ID NO: 6797 - RNA, 21 nt, RNAi-sense strand
cuucauuccuuccacuaacuu

SEQ ID NO: 6798 - RNA, 21 nt, RNAi-antisense strand
guuaguggaaggaaugaaguu

SEQ ID NO: 6799 - DNA, 21 bp, Homo sapiens
gactagacatgcgaaagtttg

SEQ ID NO: 6800 - RNA, 21 nt, RNAi-sense strand
cuagacaugcgaaaguuuguu

SEQ ID NO: 6801 - RNA, 21 nt, RNAi-antisense strand
caaacuuucgcaugucuaguu

SEQ ID NO: 6802 - DNA, 21 bp, Homo sapiens
gacatgcgaaagtttgccttt

SEQ ID NO: 6803 - RNA, 21 nt, RNAi-sense strand
caugcgaaaguuugccuuuuu

SEQ ID NO: 6804 - RNA, 21 nt, RNAi-antisense strand
aaaggcaaacuuucgcauguu

SEQ ID NO: 6805 - DNA, 21 bp, Homo sapiens
gaaagtttgcctttgtaccat

SEQ ID NO: 6806 - RNA, 21 nt, RNAi-sense strand
aaguuugccuuuguaccauuu

SEQ ID NO: 6807 - RNA, 21 nt, RNAi-antisense strand
augguacaaaggcaaacuuuu

SEQ ID NO: 6808 - DNA, 21 bp, Homo sapiens
gaaattctttcagctatcagt

SEQ ID NO: 6809 - RNA, 21 nt, RNAi-sense strand
aauucuuucagcuaucaguuu

SEQ ID NO: 6810 - RNA, 21 nt, RNAi-antisense strand
acugauagcugaaagaauuuu

SEQ ID NO: 6811 - DNA, 21 bp, Homo sapiens
gaaagtagcagtgtgaagtac

SEQ ID NO: 6812 - RNA, 21 nt, RNAi-sense strand
aaguagcagugugaaguacuu

SEQ ID NO: 6813 - RNA, 21 nt, RNAi-antisense strand
guacuucacacugcuacuuuu

SEQ ID NO: 6814 - DNA, 21 bp, Homo sapiens
gagttcagtggagaggttaga

SEQ ID NO: 6815 - RNA, 21 nt, RNAi-sense strand
guucaguggagagguuagauu

SEQ ID NO: 6816 - RNA, 21 nt, RNAi-antisense strand
ucuaaccucuccacugaacuu

SEQ ID NO: 6817 - DNA, 21 bp, Homo sapiens
gagaggttagagccagccaca

SEQ ID NO: 6818 - RNA, 21 nt, RNAi-sense strand
gagguuagagccagccacauu

SEQ ID NO: 6819 - RNA, 21 nt, RNAi-antisense strand
uguggcuggcucuaaccucuu

SEQ ID NO: 6820 - DNA, 21 bp, Homo sapiens
gaggttagagccagccacact

SEQ ID NO: 6821 - RNA, 21 nt, RNAi-sense strand
gguuagagccagccacacuuu

SEQ ID NO: 6822 - RNA, 21 nt, RNAi-antisense strand
aguguggcuggcucuaaccuu

SEQ ID NO: 6823 - DNA, 21 bp, Homo sapiens
gagccagccacacttgaacct

SEQ ID NO: 6824 - RNA, 21 nt, RNAi-sense strand
gccagccacacuugaaccuuu

SEQ ID NO: 6825 - RNA, 21 nt, RNAi-antisense strand
agguucaaguguggcuggcuu

SEQ ID NO: 6826 - DNA, 21 bp, Homo sapiens
gacatctggaaacctctacat

SEQ ID NO: 6827 - RNA, 21 nt, RNAi-sense strand
caucuggaaaccucuacauuu

SEQ ID NO: 6828 - RNA, 21 nt, RNAi-antisense strand
auguagagguuuccagauguu

SEQ ID NO: 6829 - DNA, 21 bp, Homo sapiens
gaccatcctgccatccttgac

SEQ ID NO: 6830 - RNA, 21 nt, RNAi-sense strand
ccauccugccauccuugacuu

SEQ ID NO: 6831 - RNA, 21 nt, RNAi-antisense strand
gucaaggauggcaggaugguu

SEQ ID NO: 6832 - DNA, 21 bp, Homo sapiens
gatctcaaactatgacagaaa

SEQ ID NO: 6833 - RNA, 21 nt, RNAi-sense strand
ucucaaacuaugacagaaauu

SEQ ID NO: 6834 - RNA, 21 nt, RNAi-antisense strand
uuucugucauaguuugagauu

SEQ ID NO: 6835 - DNA, 21 bp, Homo sapiens
gaactgaactaatccttctgg

SEQ ID NO: 6836 - RNA, 21 nt, RNAi-sense strand
acugaacuaauccuucugguu

SEQ ID NO: 6837 - RNA, 21 nt, RNAi-antisense strand
ccagaaggauuaguucaguuu

SEQ ID NO: 6838 - DNA, 21 bp, Homo sapiens
gaactaatccttctggcagat

SEQ ID NO: 6839 - RNA, 21 nt, RNAi-sense strand
acuaauccuucuggcagauuu

SEQ ID NO: 6840 - RNA, 21 nt, RNAi-antisense strand
aucugccagaaggauuaguuu

SEQ ID NO: 6841 - DNA, 21 bp, Homo sapiens
gaatcttaccttgtgcagtca

SEQ ID NO: 6842 - RNA, 21 nt, RNAi-sense strand
aucuuaccuugugcagucauu

SEQ ID NO: 6843 - RNA, 21 nt, RNAi-antisense strand
ugacugcacaagguaagauuu

SEQ ID NO: 6844 - DNA, 21 bp, Homo sapiens
gaaattccagcgtactataat

SEQ ID NO: 6845 - RNA, 21 nt, RNAi-sense strand
aauuccagcguacuauaauuu

SEQ ID NO: 6846 - RNA, 21 nt, RNAi-antisense strand
auuauaguacgcuggaauuuu

SEQ ID NO: 6847 - DNA, 21 bp, Homo sapiens
gacaggctctgtatatatata

SEQ ID NO: 6848 - RNA, 21 nt, RNAi-sense strand
caggcucuguauauauauauu

SEQ ID NO: 6849 - RNA, 21 nt, RNAi-antisense strand
uauauauauacagagccuguu

SEQ ID NO: 6850 - DNA, 21 bp, Homo sapiens
gaatatgctgacttcacttat

SEQ ID NO: 6851 - RNA, 21 nt, RNAi-sense strand
auaugcugacuucacuuauuu

SEQ ID NO: 6852 - RNA, 21 nt, RNAi-antisense strand
auaagugaagucagcauauuu

SEQ ID NO: 6853 - DNA, 21 bp, Homo sapiens
gacttcacttattagtcttag

SEQ ID NO: 6854 - RNA, 21 nt, RNAi-sense strand
cuucacuuauuagucuuaguu

SEQ ID NO: 6855 - RNA, 21 nt, RNAi-antisense strand
cuaagacuaauaagugaaguu

SEQ ID NO: 6856 - DNA, 21 bp, Homo sapiens
gatattgtcatatcagcacat

SEQ ID NO: 6857 - RNA, 21 nt, RNAi-sense strand
uauugucauaucagcacauuu

SEQ ID NO: 6858 - RNA, 21 nt, RNAi-antisense strand
augugcugauaugacaauauu

SEQ ID NO: 6859 - DNA, 21 bp, Homo sapiens
gaaacacactgttgtttagtt

SEQ ID NO: 6860 - RNA, 21 nt, RNAi-sense strand
aacacacuguuguuuaguuuu

SEQ ID NO: 6861 - RNA, 21 nt, RNAi-antisense strand
aacuaaacaacaguguguuuu

SEQ ID NO: 6862 - DNA, 21 bp, Homo sapiens
tatcctctgagagccaagcaa

SEQ ID NO: 6863 - RNA, 21 nt, RNAi-sense strand
uccucugagagccaagcaauu

SEQ ID NO: 6864 - RNA, 21 nt, RNAi-antisense strand
uugcuuggcucucagaggauu

SEQ ID NO: 6865 - DNA, 21 bp, Homo sapiens
taaggaaggaaggaggaatga

SEQ ID NO: 6866 - RNA, 21 nt, RNAi-sense strand
aggaaggaaggaggaaugauu

SEQ ID NO: 6867 - RNA, 21 nt, RNAi-antisense strand
ucauuccuccuuccuuccuuu

SEQ ID NO: 6868 - DNA, 21 bp, Homo sapiens
tacgcacagactcgacggtgc

SEQ ID NO: 6869 - RNA, 21 nt, RNAi-sense strand
cgcacagacucgacggugcuu

SEQ ID NO: 6870 - RNA, 21 nt, RNAi-antisense strand
gcaccgucgagucugugcguu

SEQ ID NO: 6871 - DNA, 21 bp, Homo sapiens
taccgctacttcttgctgctc

SEQ ID NO: 6872 - RNA, 21 nt, RNAi-sense strand
ccgcuacuucuugcugcucuu

SEQ ID NO: 6873 - RNA, 21 nt, RNAi-antisense strand
gagcagcaagaaguagcgguu

SEQ ID NO: 6874 - DNA, 21 bp, Homo sapiens
tatcaaagaggactagtggtt

SEQ ID NO: 6875 - RNA, 21 nt, RNAi-sense strand
ucaaagaggacuagugguuuu

SEQ ID NO: 6876 - RNA, 21 nt, RNAi-antisense strand
aaccacuaguccucuuugauu

SEQ ID NO: 6877 - DNA, 21 bp, Homo sapiens
tacacaggatccgattatcag

SEQ ID NO: 6878 - RNA, 21 nt, RNAi-sense strand
cacaggauccgauuaucaguu

SEQ ID NO: 6879 - RNA, 21 nt, RNAi-antisense strand
cugauaaucggauccuguguu

SEQ ID NO: 6880 - DNA, 21 bp, Homo sapiens
tacattcagaccaggatagag

SEQ ID NO: 6881 - RNA, 21 nt, RNAi-sense strand
cauucagaccaggauagaguu

SEQ ID NO: 6882 - RNA, 21 nt, RNAi-antisense strand
cucuauccuggucugaauguu

SEQ ID NO: 6883 - DNA, 21 bp, Homo sapiens
tagaggagatggatcacttaa

SEQ ID NO: 6884 - RNA, 21 nt, RNAi-sense strand
gaggagauggaucacuuaauu

SEQ ID NO: 6885 - RNA, 21 nt, RNAi-antisense strand
uuaagugauccaucuccucuu

SEQ ID NO: 6886 - DNA, 21 bp, Homo sapiens
tatatcctttcaggagatgga

SEQ ID NO: 6887 - RNA, 21 nt, RNAi-sense strand
uauccuuucaggagauggauu

SEQ ID NO: 6888 - RNA, 21 nt, RNAi-antisense strand
uccaucuccugaaaggauauu

SEQ ID NO: 6889 - DNA, 21 bp, Homo sapiens
tatcctttcaggagatggagc

SEQ ID NO: 6890 - RNA, 21 nt, RNAi-sense strand
uccuuucaggagauggagcuu

SEQ ID NO: 6891 - RNA, 21 nt, RNAi-antisense strand
gcuccaucuccugaaaggauu

SEQ ID NO: 6892 - DNA, 21 bp, Homo sapiens
tacaggccaccaagaggctgg

SEQ ID NO: 6893 - RNA, 21 nt, RNAi-sense strand
caggccaccaagaggcugguu

SEQ ID NO: 6894 - RNA, 21 nt, RNAi-antisense strand
ccagccucuugguggccuguu

SEQ ID NO: 6895 - DNA, 21 bp, Homo sapiens
tacatccttcgagctcaagct

SEQ ID NO: 6896 - RNA, 21 nt, RNAi-sense strand
cauccuucgagcucaagcuuu

SEQ ID NO: 6897 - RNA, 21 nt, RNAi-antisense strand
agcuugagcucgaaggauguu

SEQ ID NO: 6898 - DNA, 21 bp, Homo sapiens
tattcaccaaggaggtttaca

SEQ ID NO: 6899 - RNA, 21 nt, RNAi-sense strand
uucaccaaggagguuuacauu

SEQ ID NO: 6900 - RNA, 21 nt, RNAi-antisense strand
uguaaaccuccuuggugaauu

SEQ ID NO: 6901 - DNA, 21 bp, Homo sapiens
tacatttgttgtccaagtcac

SEQ ID NO: 6902 - RNA, 21 nt, RNAi-sense strand
cauuuguuguccaagucacuu

SEQ ID NO: 6903 - RNA, 21 nt, RNAi-antisense strand
gugacuuggacaacaaauguu

SEQ ID NO: 6904 - DNA, 21 bp, Homo sapiens
tattatcaagacagctttgct

SEQ ID NO: 6905 - RNA, 21 nt, RNAi-sense strand
uuaucaagacagcuuugcuuu

SEQ ID NO: 6906 - RNA, 21 nt, RNAi-antisense strand
agcaaagcugucuugauaauu

SEQ ID NO: 6907 - DNA, 21 bp, Homo sapiens
tatcaagacagctttgctcaa

SEQ ID NO: 6908 - RNA, 21 nt, RNAi-sense strand
ucaagacagcuuugcucaauu

SEQ ID NO: 6909 - RNA, 21 nt, RNAi-antisense strand
uugagcaaagcugucuugauu

SEQ ID NO: 6910 - DNA, 21 bp, Homo sapiens
taccaagtggtgattcaagcc

SEQ ID NO: 6911 - RNA, 21 nt, RNAi-sense strand
ccaaguggugauucaagccuu

SEQ ID NO: 6912 - RNA, 21 nt, RNAi-antisense strand
ggcuugaaucaccacuugguu

SEQ ID NO: 6913 - DNA, 21 bp, Homo sapiens
tacagcatcacagacggtgag

SEQ ID NO: 6914 - RNA, 21 nt, RNAi-sense strand
cagcaucacagacggugaguu

SEQ ID NO: 6915 - RNA, 21 nt, RNAi-antisense strand
cucaccgucugugaugcuguu

SEQ ID NO: 6916 - DNA, 21 bp, Homo sapiens
tatgtttgatgtcatcaccga

SEQ ID NO: 6917 - RNA, 21 nt, RNAi-sense strand
uguuugaugucaucaccgauu

SEQ ID NO: 6918 - RNA, 21 nt, RNAi-antisense strand
ucggugaugacaucaaacauu

SEQ ID NO: 6919 - DNA, 21 bp, Homo sapiens
taaagtggaagcctccaatcc

SEQ ID NO: 6920 - RNA, 21 nt, RNAi-sense strand
aaguggaagccuccaauccuu

SEQ ID NO: 6921 - RNA, 21 nt, RNAi-antisense strand
ggauuggaggcuuccacuuuu

SEQ ID NO: 6922 - DNA, 21 bp, Homo sapiens
tatgttgagccacgatttctc

SEQ ID NO: 6923 - RNA, 21 nt, RNAi-sense strand
uguugagccacgauuucucuu

SEQ ID NO: 6924 - RNA, 21 nt, RNAi-antisense strand
gagaaaucguggcucaacauu

SEQ ID NO: 6925 - DNA, 21 bp, Homo sapiens
tagaattgtggtggaggatgt

SEQ ID NO: 6926 - RNA, 21 nt, RNAi-sense strand
gaauugugguggaggauguuu

SEQ ID NO: 6927 - RNA, 21 nt, RNAi-antisense strand
acauccuccaccacaauucuu

SEQ ID NO: 6928 - DNA, 21 bp, Homo sapiens
tagatgagccacctgtcttca

SEQ ID NO: 6929 - RNA, 21 nt, RNAi-sense strand
gaugagccaccugucuucauu

SEQ ID NO: 6930 - RNA, 21 nt, RNAi-antisense strand
ugaagacagguggcucaucuu

SEQ ID NO: 6931 - DNA, 21 bp, Homo sapiens
tacaaataagagaagatgctc

SEQ ID NO: 6932 - RNA, 21 nt, RNAi-sense strand
caaauaagagaagaugcucuu

SEQ ID NO: 6933 - RNA, 21 nt, RNAi-antisense strand
gagcaucuucucuuauuuguu

SEQ ID NO: 6934 - DNA, 21 bp, Homo sapiens
taagagaagatgctcagataa

SEQ ID NO: 6935 - RNA, 21 nt, RNAi-sense strand
agagaagaugcucagauaauu

SEQ ID NO: 6936 - RNA, 21 nt, RNAi-antisense strand
uuaucugagcaucuucucuuu

SEQ ID NO: 6937 - DNA, 21 bp, Homo sapiens
taaacaccacaataggctccg

SEQ ID NO: 6938 - RNA, 21 nt, RNAi-sense strand
aacaccacaauaggcuccguu

SEQ ID NO: 6939 - RNA, 21 nt, RNAi-antisense strand
cggagccuauugugguguuuu

SEQ ID NO: 6940 - DNA, 21 bp, Homo sapiens
tactctgtagatcgacacaca

SEQ ID NO: 6941 - RNA, 21 nt, RNAi-sense strand
cucuguagaucgacacacauu

SEQ ID NO: 6942 - RNA, 21 nt, RNAi-antisense strand
ugugugucgaucuacagaguu

SEQ ID NO: 6943 - DNA, 21 bp, Homo sapiens
tagatcgacacacagatatgg

SEQ ID NO: 6944 - RNA, 21 nt, RNAi-sense strand
gaucgacacacagauaugguu

SEQ ID NO: 6945 - RNA, 21 nt, RNAi-antisense strand
ccauaucugugugucgaucuu

SEQ ID NO: 6946 - DNA, 21 bp, Homo sapiens
tacatcgaaacttcttgaccg

SEQ ID NO: 6947 - RNA, 21 nt, RNAi-sense strand
caucgaaacuucuugaccguu

SEQ ID NO: 6948 - RNA, 21 nt, RNAi-antisense strand
cggucaagaaguuucgauguu

SEQ ID NO: 6949 - DNA, 21 bp, Homo sapiens
tatggcacaacattacagtga

SEQ ID NO: 6950 - RNA, 21 nt, RNAi-sense strand
uggcacaacauuacagugauu

SEQ ID NO: 6951 - RNA, 21 nt, RNAi-antisense strand
ucacuguaauguugugccauu

SEQ ID NO: 6952 - DNA, 21 bp, Homo sapiens
tacagtgatagcaacagagat

SEQ ID NO: 6953 - RNA, 21 nt, RNAi-sense strand
cagugauagcaacagagauuu

SEQ ID NO: 6954 - RNA, 21 nt, RNAi-antisense strand
aucucuguugcuaucacuguu

SEQ ID NO: 6955 - DNA, 21 bp, Homo sapiens
tagcaacagagatcaataatc

SEQ ID NO: 6956 - RNA, 21 nt, RNAi-sense strand
gcaacagagaucaauaaucuu

SEQ ID NO: 6957 - RNA, 21 nt, RNAi-antisense strand
gauuauugaucucuguugcuu

SEQ ID NO: 6958 - DNA, 21 bp, Homo sapiens
taatccaaagcaaagtagtcg

SEQ ID NO: 6959 - RNA, 21 nt, RNAi-sense strand
auccaaagcaaaguagucguu

SEQ ID NO: 6960 - RNA, 21 nt, RNAi-antisense strand
cgacuacuuugcuuuggauuu

SEQ ID NO: 6961 - DNA, 21 bp, Homo sapiens
tagtcgagtacctctatatat

SEQ ID NO: 6962 - RNA, 21 nt, RNAi-sense strand
gucgaguaccucuauauauuu

SEQ ID NO: 6963 - RNA, 21 nt, RNAi-antisense strand
auauauagagguacucgacuu

SEQ ID NO: 6964 - DNA, 21 bp, Homo sapiens
taccattcaagacaacaaaga

SEQ ID NO: 6965 - RNA, 21 nt, RNAi-sense strand
ccauucaagacaacaaagauu

SEQ ID NO: 6966 - RNA, 21 nt, RNAi-antisense strand
ucuuuguugucuugaaugguu

SEQ ID NO: 6967 - DNA, 21 bp, Homo sapiens
tataatagacacgagatgagc

SEQ ID NO: 6968 - RNA, 21 nt, RNAi-sense strand
uaauagacacgagaugagcuu

SEQ ID NO: 6969 - RNA, 21 nt, RNAi-antisense strand
gcucaucucgugucuauuauu

SEQ ID NO: 6970 - DNA, 21 bp, Homo sapiens
taatagacacgagatgagcac

SEQ ID NO: 6971 - RNA, 21 nt, RNAi-sense strand
auagacacgagaugagcacuu

SEQ ID NO: 6972 - RNA, 21 nt, RNAi-antisense strand
gugcucaucucgugucuauuu

SEQ ID NO: 6973 - DNA, 21 bp, Homo sapiens
tagacacgagatgagcaccta

SEQ ID NO: 6974 - RNA, 21 nt, RNAi-sense strand
gacacgagaugagcaccuauu

SEQ ID NO: 6975 - RNA, 21 nt, RNAi-antisense strand
uaggugcucaucucgugucuu

SEQ ID NO: 6976 - DNA, 21 bp, Homo sapiens
tatctcttgcctgtggtcatt

SEQ ID NO: 6977 - RNA, 21 nt, RNAi-sense strand
ucucuugccuguggucauuuu

SEQ ID NO: 6978 - RNA, 21 nt, RNAi-antisense strand
aaugaccacaggcaagagauu

SEQ ID NO: 6979 - DNA, 21 bp, Homo sapiens
tactagtgacagtggtgctgt

SEQ ID NO: 6980 - RNA, 21 nt, RNAi-sense strand
cuagugacaguggugcuguuu

SEQ ID NO: 6981 - RNA, 21 nt, RNAi-antisense strand
acagcaccacugucacuaguu

SEQ ID NO: 6982 - DNA, 21 bp, Homo sapiens
tagtgacagtggtgctgtttg

SEQ ID NO: 6983 - RNA, 21 nt, RNAi-sense strand
gugacaguggugcuguuuguu

SEQ ID NO: 6984 - RNA, 21 nt, RNAi-antisense strand
caaacagcaccacugucacuu

SEQ ID NO: 6985 - DNA, 21 bp, Homo sapiens
taacattgtcagttacaacga

SEQ ID NO: 6986 - RNA, 21 nt, RNAi-sense strand
acauugucaguuacaacgauu

SEQ ID NO: 6987 - RNA, 21 nt, RNAi-antisense strand
ucguuguaacugacaauguuu

SEQ ID NO: 6988 - DNA, 21 bp, Homo sapiens
tacaacgacgaaggtggtgga

SEQ ID NO: 6989 - RNA, 21 nt, RNAi-sense strand
caacgacgaaggugguggauu

SEQ ID NO: 6990 - RNA, 21 nt, RNAi-antisense strand
uccaccaccuucgucguuguu

SEQ ID NO: 6991 - DNA, 21 bp, Homo sapiens
tagaggacaacaaattacgaa

SEQ ID NO: 6992 - RNA, 21 nt, RNAi-sense strand
gaggacaacaaauuacgaauu

SEQ ID NO: 6993 - RNA, 21 nt, RNAi-antisense strand
uucguaauuuguuguccucuu

SEQ ID NO: 6994 - DNA, 21 bp, Homo sapiens
tacgactccttggccacttac

SEQ ID NO: 6995 - RNA, 21 nt, RNAi-sense strand
cgacuccuuggccacuuacuu

SEQ ID NO: 6996 - RNA, 21 nt, RNAi-antisense strand
guaaguggccaaggagucguu

SEQ ID NO: 6997 - DNA, 21 bp, Homo sapiens
tacgcctatgaaggcactggc

SEQ ID NO: 6998 - RNA, 21 nt, RNAi-sense strand
cgccuaugaaggcacuggcuu

SEQ ID NO: 6999 - RNA, 21 nt, RNAi-antisense strand
gccagugccuucauaggcguu

SEQ ID NO: 7000 - DNA, 21 bp, Homo sapiens
tatgaaggcactggctccgtg

SEQ ID NO: 7001 - RNA, 21 nt, RNAi-sense strand
ugaaggcacuggcuccguguu

SEQ ID NO: 7002 - RNA, 21 nt, RNAi-antisense strand
cacggagccagugccuucauu

SEQ ID NO: 7003 - DNA, 21 bp, Homo sapiens
tatgattaccttagtgactgg

SEQ ID NO: 7004 - RNA, 21 nt, RNAi-sense strand
ugauuaccuuagugacugguu

SEQ ID NO: 7005 - RNA, 21 nt, RNAi-antisense strand
ccagucacuaagguaaucauu

SEQ ID NO: 7006 - DNA, 21 bp, Homo sapiens
tatgtatggaggagtggacag

SEQ ID NO: 7007 - RNA, 21 nt, RNAi-sense strand
uguauggaggaguggacaguu

SEQ ID NO: 7008 - RNA, 21 nt, RNAi-antisense strand
cuguccacuccuccauacauu

SEQ ID NO: 7009 - DNA, 21 bp, Homo sapiens
tatggaggagtggacagtgac

SEQ ID NO: 7010 - RNA, 21 nt, RNAi-sense strand
uggaggaguggacagugacuu

SEQ ID NO: 7011 - RNA, 21 nt, RNAi-antisense strand
gucacuguccacuccuccauu

SEQ ID NO: 7012 - DNA, 21 bp, Homo sapiens
tacgacactgaaatatgtgaa

SEQ ID NO: 7013 - RNA, 21 nt, RNAi-sense strand
cgacacugaaauaugugaauu

SEQ ID NO: 7014 - RNA, 21 nt, RNAi-antisense strand
uucacauauuucagugucguu

SEQ ID NO: 7015 - DNA, 21 bp, Homo sapiens
tatgtgaagtggctatttctt

SEQ ID NO: 7016 - RNA, 21 nt, RNAi-sense strand
ugugaaguggcuauuucuuuu

SEQ ID NO: 7017 - RNA, 21 nt, RNAi-antisense strand
aagaaauagccacuucacauu

SEQ ID NO: 7018 - DNA, 21 bp, Homo sapiens
tatatttatccactactccgt

SEQ ID NO: 7019 - RNA, 21 nt, RNAi-sense strand
uauuuauccacuacuccguuu

SEQ ID NO: 7020 - RNA, 21 nt, RNAi-antisense strand
acggaguaguggauaaauauu

SEQ ID NO: 7021 - DNA, 21 bp, Homo sapiens
tatttatccactactccgtga

SEQ ID NO: 7022 - RNA, 21 nt, RNAi-sense strand
uuuauccacuacuccgugauu

SEQ ID NO: 7023 - RNA, 21 nt, RNAi-antisense strand
ucacggaguaguggauaaauu

SEQ ID NO: 7024 - DNA, 21 bp, Homo sapiens
tatccactactccgtgaaggc

SEQ ID NO: 7025 - RNA, 21 nt, RNAi-sense strand
uccacuacuccgugaaggcuu

SEQ ID NO: 7026 - RNA, 21 nt, RNAi-antisense strand
gccuucacggaguaguggauu

SEQ ID NO: 7027 - DNA, 21 bp, Homo sapiens
tactccgtgaaggcttctctg

SEQ ID NO: 7028 - RNA, 21 nt, RNAi-sense strand
cuccgugaaggcuucucuguu

SEQ ID NO: 7029 - RNA, 21 nt, RNAi-antisense strand
cagagaagccuucacggaguu

SEQ ID NO: 7030 - DNA, 21 bp, Homo sapiens
tagtgcatccagttaaccaag

SEQ ID NO: 7031 - RNA, 21 nt, RNAi-sense strand
gugcauccaguuaaccaaguu

SEQ ID NO: 7032 - RNA, 21 nt, RNAi-antisense strand
cuugguuaacuggaugcacuu

SEQ ID NO: 7033 - DNA, 21 bp, Homo sapiens
tactacactccatgtcaggtc

SEQ ID NO: 7034 - RNA, 21 nt, RNAi-sense strand
cuacacuccaugucaggucuu

SEQ ID NO: 7035 - RNA, 21 nt, RNAi-antisense strand
gaccugacauggaguguaguu

SEQ ID NO: 7036 - DNA, 21 bp, Homo sapiens
tacactccatgtcaggtcagc

SEQ ID NO: 7037 - RNA, 21 nt, RNAi-sense strand
cacuccaugucaggucagcuu

SEQ ID NO: 7038 - RNA, 21 nt, RNAi-antisense strand
gcugaccugacauggaguguu

SEQ ID NO: 7039 - DNA, 21 bp, Homo sapiens
taactgtacatttcacaggct

SEQ ID NO: 7040 - RNA, 21 nt, RNAi-sense strand
acuguacauuucacaggcuuu

SEQ ID NO: 7041 - RNA, 21 nt, RNAi-antisense strand
agccugugaaauguacaguuu

SEQ ID NO: 7042 - DNA, 21 bp, Homo sapiens
taaaggactgtgctttaaaga

SEQ ID NO: 7043 - RNA, 21 nt, RNAi-sense strand
aaggacugugcuuuaaagauu

SEQ ID NO: 7044 - RNA, 21 nt, RNAi-antisense strand
ucuuuaaagcacaguccuuuu

SEQ ID NO: 7045 - DNA, 21 bp, Homo sapiens
tatcggctcacaaagagataa

SEQ ID NO: 7046 - RNA, 21 nt, RNAi-sense strand
ucggcucacaaagagauaauu

SEQ ID NO: 7047 - RNA, 21 nt, RNAi-antisense strand
uuaucucuuugugagccgauu

SEQ ID NO: 7048 - DNA, 21 bp, Homo sapiens
tactcttaaggaatagaagca

SEQ ID NO: 7049 - RNA, 21 nt, RNAi-sense strand
cucuuaaggaauagaagcauu

SEQ ID NO: 7050 - RNA, 21 nt, RNAi-antisense strand
ugcuucuauuccuuaagaguu

SEQ ID NO: 7051 - DNA, 21 bp, Homo sapiens
tagtacgacttcattccttcc

SEQ ID NO: 7052 - RNA, 21 nt, RNAi-sense strand
guacgacuucauuccuuccuu

SEQ ID NO: 7053 - RNA, 21 nt, RNAi-antisense strand
ggaaggaaugaagucguacuu

SEQ ID NO: 7054 - DNA, 21 bp, Homo sapiens
tacgacttcattccttccact

SEQ ID NO: 7055 - RNA, 21 nt, RNAi-sense strand
cgacuucauuccuuccacuuu

SEQ ID NO: 7056 - RNA, 21 nt, RNAi-antisense strand
aguggaaggaaugaagucguu

SEQ ID NO: 7057 - DNA, 21 bp, Homo sapiens
tatatcctagactagacatgc

SEQ ID NO: 7058 - RNA, 21 nt, RNAi-sense strand
uauccuagacuagacaugcuu

SEQ ID NO: 7059 - RNA, 21 nt, RNAi-antisense strand
gcaugucuagucuaggauauu

SEQ ID NO: 7060 - DNA, 21 bp, Homo sapiens
tatcctagactagacatgcga

SEQ ID NO: 7061 - RNA, 21 nt, RNAi-sense strand
uccuagacuagacaugcgauu

SEQ ID NO: 7062 - RNA, 21 nt, RNAi-antisense strand
ucgcaugucuagucuaggauu

SEQ ID NO: 7063 - DNA, 21 bp, Homo sapiens
tagactagacatgcgaaagtt

SEQ ID NO: 7064 - RNA, 21 nt, RNAi-sense strand
gacuagacaugcgaaaguuuu

SEQ ID NO: 7065 - RNA, 21 nt, RNAi-antisense strand
aacuuucgcaugucuagucuu

SEQ ID NO: 7066 - DNA, 21 bp, Homo sapiens
tagacatgcgaaagtttgcct

SEQ ID NO: 7067 - RNA, 21 nt, RNAi-sense strand
gacaugcgaaaguuugccuuu

SEQ ID NO: 7068 - RNA, 21 nt, RNAi-antisense strand
aggcaaacuuucgcaugucuu

SEQ ID NO: 7069 - DNA, 21 bp, Homo sapiens
tatcagtaggctaatgtcaaa

SEQ ID NO: 7070 - RNA, 21 nt, RNAi-sense strand
ucaguaggcuaaugucaaauu

SEQ ID NO: 7071 - RNA, 21 nt, RNAi-antisense strand
uuugacauuagccuacugauu

SEQ ID NO: 7072 - DNA, 21 bp, Homo sapiens
tatactgtacatgaaagtagc

SEQ ID NO: 7073 - RNA, 21 nt, RNAi-sense strand
uacuguacaugaaaguagcuu

SEQ ID NO: 7074 - RNA, 21 nt, RNAi-antisense strand
gcuacuuucauguacaguauu

SEQ ID NO: 7075 - DNA, 21 bp, Homo sapiens
tactgtacatgaaagtagcag

SEQ ID NO: 7076 - RNA, 21 nt, RNAi-sense strand
cuguacaugaaaguagcaguu

SEQ ID NO: 7077 - RNA, 21 nt, RNAi-antisense strand
cugcuacuuucauguacaguu

SEQ ID NO: 7078 - DNA, 21 bp, Homo sapiens
tacatgaaagtagcagtgtga

SEQ ID NO: 7079 - RNA, 21 nt, RNAi-sense strand
caugaaaguagcagugugauu

SEQ ID NO: 7080 - RNA, 21 nt, RNAi-antisense strand
ucacacugcuacuuucauguu

SEQ ID NO: 7081 - DNA, 21 bp, Homo sapiens
tagcagtgtgaagtacaataa

SEQ ID NO: 7082 - RNA, 21 nt, RNAi-sense strand
gcagugugaaguacaauaauu

SEQ ID NO: 7083 - RNA, 21 nt, RNAi-antisense strand
uuauuguacuucacacugcuu

SEQ ID NO: 7084 - DNA, 21 bp, Homo sapiens
tatccttcttacacgactaag

SEQ ID NO: 7085 - RNA, 21 nt, RNAi-sense strand
uccuucuuacacgacuaaguu

SEQ ID NO: 7086 - RNA, 21 nt, RNAi-antisense strand
cuuagucguguaagaaggauu

SEQ ID NO: 7087 - DNA, 21 bp, Homo sapiens
tacacgactaagttgaattag

SEQ ID NO: 7088 - RNA, 21 nt, RNAi-sense strand
cacgacuaaguugaauuaguu

SEQ ID NO: 7089 - RNA, 21 nt, RNAi-antisense strand
cuaauucaacuuagucguguu

SEQ ID NO: 7090 - DNA, 21 bp, Homo sapiens
taaatctcactctaggagttc

SEQ ID NO: 7091 - RNA, 21 nt, RNAi-sense strand
aaucucacucuaggaguucuu

SEQ ID NO: 7092 - RNA, 21 nt, RNAi-antisense strand
gaacuccuagagugagauuuu

SEQ ID NO: 7093 - DNA, 21 bp, Homo sapiens
taggagttcagtggagaggtt

SEQ ID NO: 7094 - RNA, 21 nt, RNAi-sense strand
ggaguucaguggagagguuuu

SEQ ID NO: 7095 - RNA, 21 nt, RNAi-antisense strand
aaccucuccacugaacuccuu

SEQ ID NO: 7096 - DNA, 21 bp, Homo sapiens
tagagccagccacacttgaac

SEQ ID NO: 7097 - RNA, 21 nt, RNAi-sense strand
gagccagccacacuugaacuu

SEQ ID NO: 7098 - RNA, 21 nt, RNAi-antisense strand
guucaaguguggcuggcucuu

SEQ ID NO: 7099 - DNA, 21 bp, Homo sapiens
tacatattccatgtttggaag

SEQ ID NO: 7100 - RNA, 21 nt, RNAi-sense strand
cauauuccauguuuggaaguu

SEQ ID NO: 7101 - RNA, 21 nt, RNAi-antisense strand
cuuccaaacauggaauauguu

SEQ ID NO: 7102 - DNA, 21 bp, Homo sapiens
taactttgctttcatgaccat

SEQ ID NO: 7103 - RNA, 21 nt, RNAi-sense strand
acuuugcuuucaugaccauuu

SEQ ID NO: 7104 - RNA, 21 nt, RNAi-antisense strand
auggucaugaaagcaaaguuu

SEQ ID NO: 7105 - DNA, 21 bp, Homo sapiens
tatgcaattagcctcatagtt

SEQ ID NO: 7106 - RNA, 21 nt, RNAi-sense strand
ugcaauuagccucauaguuuu

SEQ ID NO: 7107 - RNA, 21 nt, RNAi-antisense strand
aacuaugaggcuaauugcauu

SEQ ID NO: 7108 - DNA, 21 bp, Homo sapiens
tagcctcatagttattatcca

SEQ ID NO: 7109 - RNA, 21 nt, RNAi-sense strand
gccucauaguuauuauccauu

SEQ ID NO: 7110 - RNA, 21 nt, RNAi-antisense strand
uggauaauaacuaugaggcuu

SEQ ID NO: 7111 - DNA, 21 bp, Homo sapiens
taatccttctggcagattcaa

SEQ ID NO: 7112 - RNA, 21 nt, RNAi-sense strand
auccuucuggcagauucaauu

SEQ ID NO: 7113 - RNA, 21 nt, RNAi-antisense strand
uugaaucugccagaaggauuu

SEQ ID NO: 7114 - DNA, 21 bp, Homo sapiens
tatttcacacgctgttctaat

SEQ ID NO: 7115 - RNA, 21 nt, RNAi-sense strand
uuucacacgcuguucuaauuu

SEQ ID NO: 7116 - RNA, 21 nt, RNAi-antisense strand
auuagaacagcgugugaaauu

SEQ ID NO: 7117 - DNA, 21 bp, Homo sapiens
tagaatcttaccttgtgcagt

SEQ ID NO: 7118 - RNA, 21 nt, RNAi-sense strand
gaaucuuaccuugugcaguuu

SEQ ID NO: 7119 - RNA, 21 nt, RNAi-antisense strand
acugcacaagguaagauucuu

SEQ ID NO: 7120 - DNA, 21 bp, Homo sapiens
taccttgtgcagtcatcagaa

SEQ ID NO: 7121 - RNA, 21 nt, RNAi-sense strand
ccuugugcagucaucagaauu

SEQ ID NO: 7122 - RNA, 21 nt, RNAi-antisense strand
uucugaugacugcacaagguu

SEQ ID NO: 7123 - DNA, 21 bp, Homo sapiens
taagaatatgctgacttcact

SEQ ID NO: 7124 - RNA, 21 nt, RNAi-sense strand
agaauaugcugacuucacuuu

SEQ ID NO: 7125 - RNA, 21 nt, RNAi-antisense strand
agugaagucagcauauucuuu

SEQ ID NO: 7126 - DNA, 21 bp, Homo sapiens
tatgctgacttcacttattag

SEQ ID NO: 7127 - RNA, 21 nt, RNAi-sense strand
ugcugacuucacuuauuaguu

SEQ ID NO: 7128 - RNA, 21 nt, RNAi-antisense strand
cuaauaagugaagucagcauu

SEQ ID NO: 7129 - DNA, 21 bp, Homo sapiens
aatacacaggatccgattatc

SEQ ID NO: 7130 - RNA, 21 nt, RNAi-sense strand
uacacaggauccgauuaucuu

SEQ ID NO: 7131 - RNA, 21 nt, RNAi-antisense strand
gauaaucggauccuguguauu

SEQ ID NO: 7132 - DNA, 21 bp, Homo sapiens
aaatgtctgatgtcggtacat

SEQ ID NO: 7133 - RNA, 21 nt, RNAi-sense strand
augucugaugucgguacauuu

SEQ ID NO: 7134 - RNA, 21 nt, RNAi-antisense strand
auguaccgacaucagacauuu

SEQ ID NO: 7135 - DNA, 21 bp, Homo sapiens
aatgtctgatgtcggtacatt

SEQ ID NO: 7136 - RNA, 21 nt, RNAi-sense strand
ugucugaugucgguacauuuu

SEQ ID NO: 7137 - RNA, 21 nt, RNAi-antisense strand
aauguaccgacaucagacauu

SEQ ID NO: 7138 - DNA, 21 bp, Homo sapiens
aagttgtctacagtattctac

SEQ ID NO: 7139 - RNA, 21 nt, RNAi-sense strand
guugucuacaguauucuacuu

SEQ ID NO: 7140 - RNA, 21 nt, RNAi-antisense strand
guagaauacuguagacaacuu

SEQ ID NO: 7141 - DNA, 21 bp, Homo sapiens
aaatgctgaaattgagtacag

SEQ ID NO: 7142 - RNA, 21 nt, RNAi-sense strand
augcugaaauugaguacaguu

SEQ ID NO: 7143 - RNA, 21 nt, RNAi-antisense strand
cuguacucaauuucagcauuu

SEQ ID NO: 7144 - DNA, 21 bp, Homo sapiens
aatgctgaaattgagtacagc

SEQ ID NO: 7145 - RNA, 21 nt, RNAi-sense strand
ugcugaaauugaguacagcuu

SEQ ID NO: 7146 - RNA, 21 nt, RNAi-antisense strand
gcuguacucaauuucagcauu

SEQ ID NO: 7147 - DNA, 21 bp, Homo sapiens
aaattgagtacagcatcacag

SEQ ID NO: 7148 - RNA, 21 nt, RNAi-sense strand
auugaguacagcaucacaguu

SEQ ID NO: 7149 - RNA, 21 nt, RNAi-antisense strand
cugugaugcuguacucaauuu

SEQ ID NO: 7150 - DNA, 21 bp, Homo sapiens
aaagtggaagcctccaatcct

SEQ ID NO: 7151 - RNA, 21 nt, RNAi-sense strand
aguggaagccuccaauccuuu

SEQ ID NO: 7152 - RNA, 21 nt, RNAi-antisense strand
aggauuggaggcuuccacuuu

SEQ ID NO: 7153 - DNA, 21 bp, Homo sapiens
aagtggaagcctccaatcctt

SEQ ID NO: 7154 - RNA, 21 nt, RNAi-sense strand
guggaagccuccaauccuuuu

SEQ ID NO: 7155 - RNA, 21 nt, RNAi-antisense strand
aaggauuggaggcuuccacuu

SEQ ID NO: 7156 - DNA, 21 bp, Homo sapiens
aagcctccaatccttatgttg

SEQ ID NO: 7157 - RNA, 21 nt, RNAi-sense strand
gccuccaauccuuauguuguu

SEQ ID NO: 7158 - RNA, 21 nt, RNAi-antisense strand
caacauaaggauuggaggcuu

SEQ ID NO: 7159 - DNA, 21 bp, Homo sapiens
aatccttatgttgagccacga

SEQ ID NO: 7160 - RNA, 21 nt, RNAi-sense strand
uccuuauguugagccacgauu

SEQ ID NO: 7161 - RNA, 21 nt, RNAi-antisense strand
ucguggcucaacauaaggauu

SEQ ID NO: 7162 - DNA, 21 bp, Homo sapiens
aaagattcagccacggttaga

SEQ ID NO: 7163 - RNA, 21 nt, RNAi-sense strand
agauucagccacgguuagauu

SEQ ID NO: 7164 - RNA, 21 nt, RNAi-antisense strand
ucuaaccguggcugaaucuuu

SEQ ID NO: 7165 - DNA, 21 bp, Homo sapiens
aagattcagccacggttagaa

SEQ ID NO: 7166 - RNA, 21 nt, RNAi-sense strand
gauucagccacgguuagaauu

SEQ ID NO: 7167 - RNA, 21 nt, RNAi-antisense strand
uucuaaccguggcugaaucuu

SEQ ID NO: 7168 - DNA, 21 bp, Homo sapiens
aagagaagatgctcagataaa

SEQ ID NO: 7169 - RNA, 21 nt, RNAi-sense strand
gagaagaugcucagauaaauu

SEQ ID NO: 7170 - RNA, 21 nt, RNAi-antisense strand
uuuaucugagcaucuucucuu

SEQ ID NO: 7171 - DNA, 21 bp, Homo sapiens
aaacaccacaataggctccgt

SEQ ID NO: 7172 - RNA, 21 nt, RNAi-sense strand
acaccacaauaggcuccguuu

SEQ ID NO: 7173 - RNA, 21 nt, RNAi-antisense strand
acggagccuauugugguguuu

SEQ ID NO: 7174 - DNA, 21 bp, Homo sapiens
aatcctgtcaagtactctgta

SEQ ID NO: 7175 - RNA, 21 nt, RNAi-sense strand
uccugucaaguacucuguauu

SEQ ID NO: 7176 - RNA, 21 nt, RNAi-antisense strand
uacagaguacuugacaggauu

SEQ ID NO: 7177 - DNA, 21 bp, Homo sapiens
aagtactctgtagatcgacac

SEQ ID NO: 7178 - RNA, 21 nt, RNAi-sense strand
guacucuguagaucgacacuu

SEQ ID NO: 7179 - RNA, 21 nt, RNAi-antisense strand
gugucgaucuacagaguacuu

SEQ ID NO: 7180 - DNA, 21 bp, Homo sapiens
aaacactgctatggcacaaca

SEQ ID NO: 7181 - RNA, 21 nt, RNAi-sense strand
acacugcuauggcacaacauu

SEQ ID NO: 7182 - RNA, 21 nt, RNAi-antisense strand
uguugugccauagcaguguuu

SEQ ID NO: 7183 - DNA, 21 bp, Homo sapiens
aacactgctatggcacaacat

SEQ ID NO: 7184 - RNA, 21 nt, RNAi-sense strand
cacugcuauggcacaacauuu

SEQ ID NO: 7185 - RNA, 21 nt, RNAi-antisense strand
auguugugccauagcaguguu

SEQ ID NO: 7186 - DNA, 21 bp, Homo sapiens
aaagtagtcgagtacctctat

SEQ ID NO: 7187 - RNA, 21 nt, RNAi-sense strand
aguagucgaguaccucuauuu

SEQ ID NO: 7188 - RNA, 21 nt, RNAi-antisense strand
auagagguacucgacuacuuu

SEQ ID NO: 7189 - DNA, 21 bp, Homo sapiens
aagtagtcgagtacctctata

SEQ ID NO: 7190 - RNA, 21 nt, RNAi-sense strand
guagucgaguaccucuauauu

SEQ ID NO: 7191 - RNA, 21 nt, RNAi-antisense strand
uauagagguacucgacuacuu

SEQ ID NO: 7192 - DNA, 21 bp, Homo sapiens
aaatggctataatagacacga

SEQ ID NO: 7193 - RNA, 21 nt, RNAi-sense strand
auggcuauaauagacacgauu

SEQ ID NO: 7194 - RNA, 21 nt, RNAi-antisense strand
ucgugucuauuauagccauuu

SEQ ID NO: 7195 - DNA, 21 bp, Homo sapiens
aatggctataatagacacgag

SEQ ID NO: 7196 - RNA, 21 nt, RNAi-sense strand
uggcuauaauagacacgaguu

SEQ ID NO: 7197 - RNA, 21 nt, RNAi-antisense strand
cucgugucuauuauagccauu

SEQ ID NO: 7198 - DNA, 21 bp, Homo sapiens
aaagaggacatcagagataac

SEQ ID NO: 7199 - RNA, 21 nt, RNAi-sense strand
agaggacaucagagauaacuu

SEQ ID NO: 7200 - RNA, 21 nt, RNAi-antisense strand
guuaucucugauguccucuuu

SEQ ID NO: 7201 - DNA, 21 bp, Homo sapiens
aatcctgaagccatagaggac

SEQ ID NO: 7202 - RNA, 21 nt, RNAi-sense strand
uccugaagccauagaggacuu

SEQ ID NO: 7203 - RNA, 21 nt, RNAi-antisense strand
guccucuauggcuucaggauu

SEQ ID NO: 7204 - DNA, 21 bp, Homo sapiens
caggatccgattatcagtatg

SEQ ID NO: 7205 - RNA, 21 nt, RNAi-sense strand
ggauccgauuaucaguauguu

SEQ ID NO: 7206 - RNA, 21 nt, RNAi-antisense strand
cauacugauaaucggauccuu

SEQ ID NO: 7207 - DNA, 21 bp, Homo sapiens
cattcagaccaggatagagga

SEQ ID NO: 7208 - RNA, 21 nt, RNAi-sense strand
uucagaccaggauagaggauu

SEQ ID NO: 7209 - RNA, 21 nt, RNAi-antisense strand
uccucuauccuggucugaauu

SEQ ID NO: 7210 - DNA, 21 bp, Homo sapiens
caggtattatcaagacagctt

SEQ ID NO: 7211 - RNA, 21 nt, RNAi-sense strand
gguauuaucaagacagcuuuu

SEQ ID NO: 7212 - RNA, 21 nt, RNAi-antisense strand
aagcugucuugauaauaccuu

SEQ ID NO: 7213 - DNA, 21 bp, Homo sapiens
caccaccgtgaacatcacact

SEQ ID NO: 7214 - RNA, 21 nt, RNAi-sense strand
ccaccgugaacaucacacuuu

SEQ ID NO: 7215 - RNA, 21 nt, RNAi-antisense strand
agugugauguucacggugguu

SEQ ID NO: 7216 - DNA, 21 bp, Homo sapiens
caatccttatgttgagccacg

SEQ ID NO: 7217 - RNA, 21 nt, RNAi-sense strand
auccuuauguugagccacguu

SEQ ID NO: 7218 - RNA, 21 nt, RNAi-antisense strand
cguggcucaacauaaggauuu

SEQ ID NO: 7219 - DNA, 21 bp, Homo sapiens
caaagattcagccacggttag

SEQ ID NO: 7220 - RNA, 21 nt, RNAi-sense strand
aagauucagccacgguuaguu

SEQ ID NO: 7221 - RNA, 21 nt, RNAi-antisense strand
cuaaccguggcugaaucuuuu

SEQ ID NO: 7222 - DNA, 21 bp, Homo sapiens
cagccacggttagaattgtgg

SEQ ID NO: 7223 - RNA, 21 nt, RNAi-sense strand
gccacgguuagaauugugguu

SEQ ID NO: 7224 - RNA, 21 nt, RNAi-antisense strand
ccacaauucuaaccguggcuu

SEQ ID NO: 7225 - DNA, 21 bp, Homo sapiens
cagcaaactggcctacatctt

SEQ ID NO: 7226 - RNA, 21 nt, RNAi-sense strand
gcaaacuggccuacaucuuuu

SEQ ID NO: 7227 - RNA, 21 nt, RNAi-antisense strand
aagauguaggccaguuugcuu

SEQ ID NO: 7228 - DNA, 21 bp, Homo sapiens
cagataaacaccacaataggc

SEQ ID NO: 7229 - RNA, 21 nt, RNAi-sense strand
gauaaacaccacaauaggcuu

SEQ ID NO: 7230 - RNA, 21 nt, RNAi-antisense strand
gccuauugugguguuuaucuu

SEQ ID NO: 7231 - DNA, 21 bp, Homo sapiens
caagtactctgtagatcgaca

SEQ ID NO: 7232 - RNA, 21 nt, RNAi-sense strand
aguacucuguagaucgacauu

SEQ ID NO: 7233 - RNA, 21 nt, RNAi-antisense strand
ugucgaucuacagaguacuuu

SEQ ID NO: 7234 - DNA, 21 bp, Homo sapiens
catcgaaacttcttgaccgag

SEQ ID NO: 7235 - RNA, 21 nt, RNAi-sense strand
ucgaaacuucuugaccgaguu

SEQ ID NO: 7236 - RNA, 21 nt, RNAi-antisense strand
cucggucaagaaguuucgauu

SEQ ID NO: 7237 - DNA, 21 bp, Homo sapiens
cactgctatggcacaacatta

SEQ ID NO: 7238 - RNA, 21 nt, RNAi-sense strand
cugcuauggcacaacauuauu

SEQ ID NO: 7239 - RNA, 21 nt, RNAi-antisense strand
uaauguugugccauagcaguu

SEQ ID NO: 7240 - DNA, 21 bp, Homo sapiens
cagagatcaataatccaaagc

SEQ ID NO: 7241 - RNA, 21 nt, RNAi-sense strand
gagaucaauaauccaaagcuu

SEQ ID NO: 7242 - RNA, 21 nt, RNAi-antisense strand
gcuuuggauuauugaucucuu

SEQ ID NO: 7243 - DNA, 21 bp, Homo sapiens
caaagtagtcgagtacctcta

SEQ ID NO: 7244 - RNA, 21 nt, RNAi-sense strand
aaguagucgaguaccucuauu

SEQ ID NO: 7245 - RNA, 21 nt, RNAi-antisense strand
uagagguacucgacuacuuuu

SEQ ID NO: 7246 - DNA, 21 bp, Homo sapiens
catccttctgtgcatcgtgat

SEQ ID NO: 7247 - RNA, 21 nt, RNAi-sense strand
uccuucugugcaucgugauuu

SEQ ID NO: 7248 - RNA, 21 nt, RNAi-antisense strand
aucacgaugcacagaaggauu

SEQ ID NO: 7249 - DNA, 21 bp, Homo sapiens
catcgtgatcctactagtgac

SEQ ID NO: 7250 - RNA, 21 nt, RNAi-sense strand
ucgugauccuacuagugacuu

SEQ ID NO: 7251 - RNA, 21 nt, RNAi-antisense strand
gucacuaguaggaucacgauu

SEQ ID NO: 7252 - DNA, 21 bp, Homo sapiens
caaagaggacatcagagataa

SEQ ID NO: 7253 - RNA, 21 nt, RNAi-sense strand
aagaggacaucagagauaauu

SEQ ID NO: 7254 - RNA, 21 nt, RNAi-antisense strand
uuaucucugauguccucuuuu

SEQ ID NO: 7255 - DNA, 21 bp, Homo sapiens
cagttacaacgacgaaggtgg

SEQ ID NO: 7256 - RNA, 21 nt, RNAi-sense strand
guuacaacgacgaaggugguu

SEQ ID NO: 7257 - RNA, 21 nt, RNAi-antisense strand
ccaccuucgucguuguaacuu

SEQ ID NO: 7258 - DNA, 21 bp, Homo sapiens
caacaccgatgtcagagattt

SEQ ID NO: 7259 - RNA, 21 nt, RNAi-sense strand
acaccgaugucagagauuuuu

SEQ ID NO: 7260 - RNA, 21 nt, RNAi-antisense strand
aaaucucugacaucgguguuu

SEQ ID NO: 7261 - DNA, 21 bp, Homo sapiens
cacttacgcctatgaaggcac

SEQ ID NO: 7262 - RNA, 21 nt, RNAi-sense strand
cuuacgccuaugaaggcacuu

SEQ ID NO: 7263 - RNA, 21 nt, RNAi-antisense strand
gugccuucauaggcguaaguu

SEQ ID NO: 7264 - DNA, 21 bp, Homo sapiens
gaggaatacacaggatccgat

SEQ ID NO: 7265 - RNA, 21 nt, RNAi-sense strand
ggaauacacaggauccgauuu

SEQ ID NO: 7266 - RNA, 21 nt, RNAi-antisense strand
aucggauccuguguauuccuu

SEQ ID NO: 7267 - DNA, 21 bp, Homo sapiens
gaatacacaggatccgattat

SEQ ID NO: 7268 - RNA, 21 nt, RNAi-sense strand
auacacaggauccgauuauuu

SEQ ID NO: 7269 - RNA, 21 nt, RNAi-antisense strand
auaaucggauccuguguauuu

SEQ ID NO: 7270 - DNA, 21 bp, Homo sapiens
gaaatgtctgatgtcggtaca

SEQ ID NO: 7271 - RNA, 21 nt, RNAi-sense strand
aaugucugaugucgguacauu

SEQ ID NO: 7272 - RNA, 21 nt, RNAi-antisense strand
uguaccgacaucagacauuuu

SEQ ID NO: 7273 - DNA, 21 bp, Homo sapiens
gatgtcggtacatttgttgtc

SEQ ID NO: 7274 - RNA, 21 nt, RNAi-sense strand
ugucgguacauuuguugucuu

SEQ ID NO: 7275 - RNA, 21 nt, RNAi-antisense strand
gacaacaaauguaccgacauu

SEQ ID NO: 7276 - DNA, 21 bp, Homo sapiens
gagcagtaccaagtggtgatt

SEQ ID NO: 7277 - RNA, 21 nt, RNAi-sense strand
gcaguaccaaguggugauuuu

SEQ ID NO: 7278 - RNA, 21 nt, RNAi-antisense strand
aaucaccacuugguacugcuu

SEQ ID NO: 7279 - DNA, 21 bp, Homo sapiens
gaaattgagtacagcatcaca

SEQ ID NO: 7280 - RNA, 21 nt, RNAi-sense strand
aauugaguacagcaucacauu

SEQ ID NO: 7281 - RNA, 21 nt, RNAi-antisense strand
ugugaugcuguacucaauuuu

SEQ ID NO: 7282 - DNA, 21 bp, Homo sapiens
gaagcctccaatccttatgtt

SEQ ID NO: 7283 - RNA, 21 nt, RNAi-sense strand
agccuccaauccuuauguuuu

SEQ ID NO: 7284 - RNA, 21 nt, RNAi-antisense strand
aacauaaggauuggaggcuuu

SEQ ID NO: 7285 - DNA, 21 bp, Homo sapiens
gagccacgatttctctacttg

SEQ ID NO: 7286 - RNA, 21 nt, RNAi-sense strand
gccacgauuucucuacuuguu

SEQ ID NO: 7287 - RNA, 21 nt, RNAi-antisense strand
caaguagagaaaucguggcuu

SEQ ID NO: 7288 - DNA, 21 bp, Homo sapiens
gattcagccacggttagaatt

SEQ ID NO: 7289 - RNA, 21 nt, RNAi-sense strand
uucagccacgguuagaauuuu

SEQ ID NO: 7290 - RNA, 21 nt, RNAi-antisense strand
aauucuaaccguggcugaauu

SEQ ID NO: 7291 - DNA, 21 bp, Homo sapiens
gaggatgtagatgagccacct

SEQ ID NO: 7292 - RNA, 21 nt, RNAi-sense strand
ggauguagaugagccaccuuu

SEQ ID NO: 7293 - RNA, 21 nt, RNAi-antisense strand
agguggcucaucuacauccuu

SEQ ID NO: 7294 - DNA, 21 bp, Homo sapiens
gatgtagatgagccacctgtc

SEQ ID NO: 7295 - RNA, 21 nt, RNAi-sense strand
uguagaugagccaccugucuu

SEQ ID NO: 7296 - RNA, 21 nt, RNAi-antisense strand
gacagguggcucaucuacauu

SEQ ID NO: 7297 - DNA, 21 bp, Homo sapiens
gataaacaccacaataggctc

SEQ ID NO: 7298 - RNA, 21 nt, RNAi-sense strand
uaaacaccacaauaggcucuu

SEQ ID NO: 7299 - RNA, 21 nt, RNAi-antisense strand
gagccuauugugguguuuauu

SEQ ID NO: 7300 - DNA, 21 bp, Homo sapiens
gaatcctgtcaagtactctgt

SEQ ID NO: 7301 - RNA, 21 nt, RNAi-sense strand
auccugucaaguacucuguuu

SEQ ID NO: 7302 - RNA, 21 nt, RNAi-antisense strand
acagaguacuugacaggauuu

SEQ ID NO: 7303 - DNA, 21 bp, Homo sapiens
gaccgagaaacactgctatgg

SEQ ID NO: 7304 - RNA, 21 nt, RNAi-sense strand
ccgagaaacacugcuaugguu

SEQ ID NO: 7305 - RNA, 21 nt, RNAi-antisense strand
ccauagcaguguuucucgguu

SEQ ID NO: 7306 - DNA, 21 bp, Homo sapiens
gaaacactgctatggcacaac

SEQ ID NO: 7307 - RNA, 21 nt, RNAi-sense strand
aacacugcuauggcacaacuu

SEQ ID NO: 7308 - RNA, 21 nt, RNAi-antisense strand
guugugccauagcaguguuuu

SEQ ID NO: 7309 - DNA, 21 bp, Homo sapiens
gaacatgcaatcctgccatgc

SEQ ID NO: 7310 - RNA, 21 nt, RNAi-sense strand
acaugcaauccugccaugcuu

SEQ ID NO: 7311 - RNA, 21 nt, RNAi-antisense strand
gcauggcaggauugcauguuu

SEQ ID NO: 7312 - DNA, 21 bp, Homo sapiens
gatcctactagtgacagtggt

SEQ ID NO: 7313 - RNA, 21 nt, RNAi-sense strand
uccuacuagugacagugguuu

SEQ ID NO: 7314 - RNA, 21 nt, RNAi-antisense strand
accacugucacuaguaggauu

SEQ ID NO: 7315 - DNA, 21 bp, Homo sapiens
gaggacatcagagataacatt

SEQ ID NO: 7316 - RNA, 21 nt, RNAi-sense strand
ggacaucagagauaacauuuu

SEQ ID NO: 7317 - RNA, 21 nt, RNAi-antisense strand
aauguuaucucugauguccuu

SEQ ID NO: 7318 - DNA, 21 bp, Homo sapiens
gaatcctgaagccatagagga

SEQ ID NO: 7319 - RNA, 21 nt, RNAi-sense strand
auccugaagccauagaggauu

SEQ ID NO: 7320 - RNA, 21 nt, RNAi-antisense strand
uccucuauggcuucaggauuu

SEQ ID NO: 7321 - DNA, 21 bp, Homo sapiens
gacaacaccgatgtcagagat

SEQ ID NO: 7322 - RNA, 21 nt, RNAi-sense strand
caacaccgaugucagagauuu

SEQ ID NO: 7323 - RNA, 21 nt, RNAi-antisense strand
aucucugacaucgguguuguu

SEQ ID NO: 7324 - DNA, 21 bp, Homo sapiens
tacacaggatccgattatcag

SEQ ID NO: 7325 - RNA, 21 nt, RNAi-sense strand
cacaggauccgauuaucaguu

SEQ ID NO: 7326 - RNA, 21 nt, RNAi-antisense strand
cugauaaucggauccuguguu

SEQ ID NO: 7327 - DNA, 21 bp, Homo sapiens
tacattcagaccaggatagag

SEQ ID NO: 7328 - RNA, 21 nt, RNAi-sense strand
cauucagaccaggauagaguu

SEQ ID NO: 7329 - RNA, 21 nt, RNAi-antisense strand
cucuauccuggucugaauguu

SEQ ID NO: 7330 - DNA, 21 bp, Homo sapiens
taaacaccacaataggctccg

SEQ ID NO: 7331 - RNA, 21 nt, RNAi-sense strand
aacaccacaauaggcuccguu

SEQ ID NO: 7332 - RNA, 21 nt, RNAi-antisense strand
cggagccuauugugguguuuu

SEQ ID NO: 7333 - DNA, 21 bp, Homo sapiens
tactctgtagatcgacacaca

SEQ ID NO: 7334 - RNA, 21 nt, RNAi-sense strand
cucuguagaucgacacacauu

SEQ ID NO: 7335 - RNA, 21 nt, RNAi-antisense strand
ugugugucgaucuacagaguu

SEQ ID NO: 7336 - DNA, 21 bp, Homo sapiens
tagatcgacacacagatatgg

SEQ ID NO: 7337 - RNA, 21 nt, RNAi-sense strand
gaucgacacacagauaugguu

SEQ ID NO: 7338 - RNA, 21 nt, RNAi-antisense strand
ccauaucugugugucgaucuu

SEQ ID NO: 7339 - DNA, 21 bp, Homo sapiens
tacatcgaaacttcttgaccg

SEQ ID NO: 7340 - RNA, 21 nt, RNAi-sense strand
caucgaaacuucuugaccguu

SEQ ID NO: 7341 - RNA, 21 nt, RNAi-antisense strand
cggucaagaaguuucgauguu

SEQ ID NO: 7342 - DNA, 21 bp, Homo sapiens
tagcaacagagatcaataatc

SEQ ID NO: 7343 - RNA, 21 nt, RNAi-sense strand
gcaacagagaucaauaaucuu

SEQ ID NO: 7344 - RNA, 21 nt, RNAi-antisense strand
gauuauugaucucuguugcuu

SEQ ID NO: 7345 - DNA, 21 bp, Homo sapiens
tagtcgagtacctctatatat

SEQ ID NO: 7346 - RNA, 21 nt, RNAi-sense strand
gucgaguaccucuauauauuu

SEQ ID NO: 7347 - RNA, 21 nt, RNAi-antisense strand
auauauagagguacucgacuu

SEQ ID NO: 7348 - DNA, 21 bp, Homo sapiens
tataatagacacgagatgagc

SEQ ID NO: 7349 - RNA, 21 nt, RNAi-sense strand
uaauagacacgagaugagcuu

SEQ ID NO: 7350 - RNA, 21 nt, RNAi-antisense strand
gcucaucucgugucuauuauu

SEQ ID NO: 7351 - DNA, 21 bp, Homo sapiens
taatagacacgagatgagcac

SEQ ID NO: 7352 - RNA, 21 nt, RNAi-sense strand
auagacacgagaugagcacuu

SEQ ID NO: 7353 - RNA, 21 nt, RNAi-antisense strand
gugcucaucucgugucuauuu

SEQ ID NO: 7354 - DNA, 21 bp, Homo sapiens
taacattgtcagttacaacga

SEQ ID NO: 7355 - RNA, 21 nt, RNAi-sense strand
acauugucaguuacaacgauu

SEQ ID NO: 7356 - RNA, 21 nt, RNAi-antisense strand
ucguuguaacugacaauguuu

SEQ ID NO: 7357 - DNA, 21 bp, Homo sapiens
aactcaggctcaagcaatcct

SEQ ID NO: 7358 - RNA, 21 nt, RNAi-sense strand
cucaggcucaagcaauccuuu

SEQ ID NO: 7359 - RNA, 21 nt, RNAi-antisense strand
aggauugcuugagccugaguu

SEQ ID NO: 7360 - DNA, 21 bp, Homo sapiens
aagtaactaggactacaggca

SEQ ID NO: 7361 - RNA, 21 nt, RNAi-sense strand
guaacuaggacuacaggcauu

SEQ ID NO: 7362 - RNA, 21 nt, RNAi-antisense strand
ugccuguaguccuaguuacuu

SEQ ID NO: 7363 - DNA, 21 bp, Homo sapiens
aactaggactacaggcatgtg

SEQ ID NO: 7364 - RNA, 21 nt, RNAi-sense strand
cuaggacuacaggcauguguu

SEQ ID NO: 7365 - RNA, 21 nt, RNAi-antisense strand
cacaugccuguaguccuaguu

SEQ ID NO: 7366 - DNA, 21 bp, Homo sapiens
aacatcgtgttcttgaagacg

SEQ ID NO: 7367 - RNA, 21 nt, RNAi-sense strand
caucguguucuugaagacguu

SEQ ID NO: 7368 - RNA, 21 nt, RNAi-antisense strand
cgucuucaagaacacgauguu

SEQ ID NO: 7369 - DNA, 21 bp, Homo sapiens
aagacgcacaagacggccagc

SEQ ID NO: 7370 - RNA, 21 nt, RNAi-sense strand
gacgcacaagacggccagcuu

SEQ ID NO: 7371 - RNA, 21 nt, RNAi-antisense strand
gcuggccgucuugugcgucuu

SEQ ID NO: 7372 - DNA, 21 bp, Homo sapiens
aacatcctgttccgcttcggc

SEQ ID NO: 7373 - RNA, 21 nt, RNAi-sense strand
cauccuguuccgcuucggcuu

SEQ ID NO: 7374 - RNA, 21 nt, RNAi-antisense strand
gccgaagcggaacaggauguu

SEQ ID NO: 7375 - DNA, 21 bp, Homo sapiens
aagcaccggctcaagttcgcc

SEQ ID NO: 7376 - RNA, 21 nt, RNAi-sense strand
gcaccggcucaaguucgccuu

SEQ ID NO: 7377 - RNA, 21 nt, RNAi-antisense strand
ggcgaacuugagccggugcuu

SEQ ID NO: 7378 - DNA, 21 bp, Homo sapiens
aacatcatctgcaaccacatg

SEQ ID NO: 7379 - RNA, 21 nt, RNAi-sense strand
caucaucugcaaccacauguu

SEQ ID NO: 7380 - RNA, 21 nt, RNAi-antisense strand
caugugguugcagaugauguu

SEQ ID NO: 7381 - DNA, 21 bp, Homo sapiens
aaccacatgcgcttccactac

SEQ ID NO: 7382 - RNA, 21 nt, RNAi-sense strand
ccacaugcgcuuccacuacuu

SEQ ID NO: 7383 - RNA, 21 nt, RNAi-antisense strand
guaguggaagcgcaugugguu

SEQ ID NO: 7384 - DNA, 21 bp, Homo sapiens
aacgccatcttcatcacggtg

SEQ ID NO: 7385 - RNA, 21 nt, RNAi-sense strand
cgccaucuucaucacgguguu

SEQ ID NO: 7386 - RNA, 21 nt, RNAi-antisense strand
caccgugaugaagauggcguu

SEQ ID NO: 7387 - DNA, 21 bp, Homo sapiens
aagctgaccgagttcctgcaa

SEQ ID NO: 7388 - RNA, 21 nt, RNAi-sense strand
gcugaccgaguuccugcaauu

SEQ ID NO: 7389 - RNA, 21 nt, RNAi-antisense strand
uugcaggaacucggucagcuu

SEQ ID NO: 7390 - DNA, 21 bp, Homo sapiens
aaacctgctcttcttcgacct

SEQ ID NO: 7391 - RNA, 21 nt, RNAi-sense strand
accugcucuucuucgaccuuu

SEQ ID NO: 7392 - RNA, 21 nt, RNAi-antisense strand
aggucgaagaagagcagguuu

SEQ ID NO: 7393 - DNA, 21 bp, Homo sapiens
aacctgctcttcttcgacctg

SEQ ID NO: 7394 - RNA, 21 nt, RNAi-sense strand
ccugcucuucuucgaccuguu

SEQ ID NO: 7395 - RNA, 21 nt, RNAi-antisense strand
caggucgaagaagagcagguu

SEQ ID NO: 7396 - DNA, 21 bp, Homo sapiens
aagagtacttcgacgagtcgc

SEQ ID NO: 7397 - RNA, 21 nt, RNAi-sense strand
gaguacuucgacgagucgcuu

SEQ ID NO: 7398 - RNA, 21 nt, RNAi-antisense strand
gcgacucgucgaaguacucuu

SEQ ID NO: 7399 - DNA, 21 bp, Homo sapiens
aacgccagcttctggcgcaag

SEQ ID NO: 7400 - RNA, 21 nt, RNAi-sense strand
cgccagcuucuggcgcaaguu

SEQ ID NO: 7401 - RNA, 21 nt, RNAi-antisense strand
cuugcgccagaagcuggcguu

SEQ ID NO: 7402 - DNA, 21 bp, Homo sapiens
aacgagcgcatgcggaccatc

SEQ ID NO: 7403 - RNA, 21 nt, RNAi-sense strand
cgagcgcaugcggaccaucuu

SEQ ID NO: 7404 - RNA, 21 nt, RNAi-antisense strand
gaugguccgcaugcgcucguu

SEQ ID NO: 7405 - DNA, 21 bp, Homo sapiens
aagctctggaagttcattcgc

SEQ ID NO: 7406 - RNA, 21 nt, RNAi-sense strand
gcucuggaaguucauucgcuu

SEQ ID NO: 7407 - RNA, 21 nt, RNAi-antisense strand
gcgaaugaacuuccagagcuu

SEQ ID NO: 7408 - DNA, 21 bp, Homo sapiens
aagttcattcgcgatttcctg

SEQ ID NO: 7409 - RNA, 21 nt, RNAi-sense strand
guucauucgcgauuuccuguu

SEQ ID NO: 7410 - RNA, 21 nt, RNAi-antisense strand
caggaaaucgcgaaugaacuu

SEQ ID NO: 7411 - DNA, 21 bp, Homo sapiens
aaccgagatcagtatttaact

SEQ ID NO: 7412 - RNA, 21 nt, RNAi-sense strand
ccgagaucaguauuuaacuuu

SEQ ID NO: 7413 - RNA, 21 nt, RNAi-antisense strand
aguuaaauacugaucucgguu

SEQ ID NO: 7414 - DNA, 21 bp, Homo sapiens
aaagaatgttctatttctgcc

SEQ ID NO: 7415 - RNA, 21 nt, RNAi-sense strand
agaauguucuauuucugccuu

SEQ ID NO: 7416 - RNA, 21 nt, RNAi-antisense strand
ggcagaaauagaacauucuuu

SEQ ID NO: 7417 - DNA, 21 bp, Homo sapiens
aagaatgttctatttctgcct

SEQ ID NO: 7418 - RNA, 21 nt, RNAi-sense strand
gaauguucuauuucugccuuu

SEQ ID NO: 7419 - RNA, 21 nt, RNAi-antisense strand
aggcagaaauagaacauucuu

SEQ ID NO: 7420 - DNA, 21 bp, Homo sapiens
cactgtgtcatccagagctgg

SEQ ID NO: 7421 - RNA, 21 nt, RNAi-sense strand
cugugucauccagagcugguu

SEQ ID NO: 7422 - RNA, 21 nt, RNAi-antisense strand
ccagcucuggaugacacaguu

SEQ ID NO: 7423 - DNA, 21 bp, Homo sapiens
catccagagctggagtgcagc

SEQ ID NO: 7424 - RNA, 21 nt, RNAi-sense strand
uccagagcuggagugcagcuu

SEQ ID NO: 7425 - RNA, 21 nt, RNAi-antisense strand
gcugcacuccagcucuggauu

SEQ ID NO: 7426 - DNA, 21 bp, Homo sapiens
cagcggcacagtcatggctca

SEQ ID NO: 7427 - RNA, 21 nt, RNAi-sense strand
gcggcacagucauggcucauu

SEQ ID NO: 7428 - RNA, 21 nt, RNAi-antisense strand
ugagccaugacugugccgcuu

SEQ ID NO: 7429 - DNA, 21 bp, Homo sapiens
cacagtcatggctcactggaa

SEQ ID NO: 7430 - RNA, 21 nt, RNAi-sense strand
cagucauggcucacuggaauu

SEQ ID NO: 7431 - RNA, 21 nt, RNAi-antisense strand
uuccagugagccaugacuguu

SEQ ID NO: 7432 - DNA, 21 bp, Homo sapiens
cagtcatggctcactggaact

SEQ ID NO: 7433 - RNA, 21 nt, RNAi-sense strand
gucauggcucacuggaacuuu

SEQ ID NO: 7434 - RNA, 21 nt, RNAi-antisense strand
aguuccagugagccaugacuu

SEQ ID NO: 7435 - DNA, 21 bp, Homo sapiens
catggctcactggaactcagg

SEQ ID NO: 7436 - RNA, 21 nt, RNAi-sense strand
uggcucacuggaacucagguu

SEQ ID NO: 7437 - RNA, 21 nt, RNAi-antisense strand
ccugaguuccagugagccauu

SEQ ID NO: 7438 - DNA, 21 bp, Homo sapiens
cactggaactcaggctcaagc

SEQ ID NO: 7439 - RNA, 21 nt, RNAi-sense strand
cuggaacucaggcucaagcuu

SEQ ID NO: 7440 - RNA, 21 nt, RNAi-antisense strand
gcuugagccugaguuccaguu

SEQ ID NO: 7441 - DNA, 21 bp, Homo sapiens
cagccttccaagtaactagga

SEQ ID NO: 7442 - RNA, 21 nt, RNAi-sense strand
gccuuccaaguaacuaggauu

SEQ ID NO: 7443 - RNA, 21 nt, RNAi-antisense strand
uccuaguuacuuggaaggcuu

SEQ ID NO: 7444 - DNA, 21 bp, Homo sapiens
caagtaactaggactacaggc

SEQ ID NO: 7445 - RNA, 21 nt, RNAi-sense strand
aguaacuaggacuacaggcuu

SEQ ID NO: 7446 - RNA, 21 nt, RNAi-antisense strand
gccuguaguccuaguuacuuu

SEQ ID NO: 7447 - DNA, 21 bp, Homo sapiens
caccacgcctggtgtctgaga

SEQ ID NO: 7448 - RNA, 21 nt, RNAi-sense strand
ccacgccuggugucugagauu

SEQ ID NO: 7449 - RNA, 21 nt, RNAi-antisense strand
ucucagacaccaggcgugguu

SEQ ID NO: 7450 - DNA, 21 bp, Homo sapiens
cacgcctggtgtctgagatgc

SEQ ID NO: 7451 - RNA, 21 nt, RNAi-sense strand
cgccuggugucugagaugcuu

SEQ ID NO: 7452 - RNA, 21 nt, RNAi-antisense strand
gcaucucagacaccaggcguu

SEQ ID NO: 7453 - DNA, 21 bp, Homo sapiens
cactagtttcctgctgctggt

SEQ ID NO: 7454 - RNA, 21 nt, RNAi-sense strand
cuaguuuccugcugcugguuu

SEQ ID NO: 7455 - RNA, 21 nt, RNAi-antisense strand
accagcagcaggaaacuaguu

SEQ ID NO: 7456 - DNA, 21 bp, Homo sapiens
cactcgagccagaggcagtga

SEQ ID NO: 7457 - RNA, 21 nt, RNAi-sense strand
cucgagccagaggcagugauu

SEQ ID NO: 7458 - RNA, 21 nt, RNAi-antisense strand
ucacugccucuggcucgaguu

SEQ ID NO: 7459 - DNA, 21 bp, Homo sapiens
caacatcgtgttcttgaagac

SEQ ID NO: 7460 - RNA, 21 nt, RNAi-sense strand
acaucguguucuugaagacuu

SEQ ID NO: 7461 - RNA, 21 nt, RNAi-antisense strand
gucuucaagaacacgauguuu

SEQ ID NO: 7462 - DNA, 21 bp, Homo sapiens
catcgtgttcttgaagacgca

SEQ ID NO: 7463 - RNA, 21 nt, RNAi-sense strand
ucguguucuugaagacgcauu

SEQ ID NO: 7464 - RNA, 21 nt, RNAi-antisense strand
ugcgucuucaagaacacgauu

SEQ ID NO: 7465 - DNA, 21 bp, Homo sapiens
caacatcctgttccgcttcgg

SEQ ID NO: 7466 - RNA, 21 nt, RNAi-sense strand
acauccuguuccgcuucgguu

SEQ ID NO: 7467 - RNA, 21 nt, RNAi-antisense strand
ccgaagcggaacaggauguuu

SEQ ID NO: 7468 - DNA, 21 bp, Homo sapiens
catcctgttccgcttcggcca

SEQ ID NO: 7469 - RNA, 21 nt, RNAi-sense strand
uccuguuccgcuucggccauu

SEQ ID NO: 7470 - RNA, 21 nt, RNAi-antisense strand
uggccgaagcggaacaggauu

SEQ ID NO: 7471 - DNA, 21 bp, Homo sapiens
cagaagcaccggctcaagttc

SEQ ID NO: 7472 - RNA, 21 nt, RNAi-sense strand
gaagcaccggcucaaguucuu

SEQ ID NO: 7473 - RNA, 21 nt, RNAi-antisense strand
gaacuugagccggugcuucuu

SEQ ID NO: 7474 - DNA, 21 bp, Homo sapiens
caccggctcaagttcgccttc

SEQ ID NO: 7475 - RNA, 21 nt, RNAi-sense strand
ccggcucaaguucgccuucuu

SEQ ID NO: 7476 - RNA, 21 nt, RNAi-antisense strand
gaaggcgaacuugagccgguu

SEQ ID NO: 7477 - DNA, 21 bp, Homo sapiens
cagcctggtgcaggactatcg

SEQ ID NO: 7478 - RNA, 21 nt, RNAi-sense strand
gccuggugcaggacuaucguu

SEQ ID NO: 7479 - RNA, 21 nt, RNAi-antisense strand
cgauaguccugcaccaggcuu

SEQ ID NO: 7480 - DNA, 21 bp, Homo sapiens
caacatcatctgcaaccacat

SEQ ID NO: 7481 - RNA, 21 nt, RNAi-sense strand
acaucaucugcaaccacauuu

SEQ ID NO: 7482 - RNA, 21 nt, RNAi-antisense strand
augugguugcagaugauguuu

SEQ ID NO: 7483 - DNA, 21 bp, Homo sapiens
catcatctgcaaccacatgcg

SEQ ID NO: 7484 - RNA, 21 nt, RNAi-sense strand
ucaucugcaaccacaugcguu

SEQ ID NO: 7485 - RNA, 21 nt, RNAi-antisense strand
cgcaugugguugcagaugauu

SEQ ID NO: 7486 - DNA, 21 bp, Homo sapiens
catctgcaaccacatgcgctt

SEQ ID NO: 7487 - RNA, 21 nt, RNAi-sense strand
ucugcaaccacaugcgcuuuu

SEQ ID NO: 7488 - RNA, 21 nt, RNAi-antisense strand
aagcgcaugugguugcagauu

SEQ ID NO: 7489 - DNA, 21 bp, Homo sapiens
caaccacatgcgcttccacta

SEQ ID NO: 7490 - RNA, 21 nt, RNAi-sense strand
accacaugcgcuuccacuauu

SEQ ID NO: 7491 - RNA, 21 nt, RNAi-antisense strand
uaguggaagcgcaugugguuu

SEQ ID NO: 7492 - DNA, 21 bp, Homo sapiens
cacatgcgcttccactacgac

SEQ ID NO: 7493 - RNA, 21 nt, RNAi-sense strand
caugcgcuuccacuacgacuu

SEQ ID NO: 7494 - RNA, 21 nt, RNAi-antisense strand
gucguaguggaagcgcauguu

SEQ ID NO: 7495 - DNA, 21 bp, Homo sapiens
catgcgcttccactacgacga

SEQ ID NO: 7496 - RNA, 21 nt, RNAi-sense strand
ugcgcuuccacuacgacgauu

SEQ ID NO: 7497 - RNA, 21 nt, RNAi-antisense strand
ucgucguaguggaagcgcauu

SEQ ID NO: 7498 - DNA, 21 bp, Homo sapiens
caacgccatcttcatcacggt

SEQ ID NO: 7499 - RNA, 21 nt, RNAi-sense strand
acgccaucuucaucacgguuu

SEQ ID NO: 7500 - RNA, 21 nt, RNAi-antisense strand
accgugaugaagauggcguuu

SEQ ID NO: 7501 - DNA, 21 bp, Homo sapiens
catcttcatcacggtgctccg

SEQ ID NO: 7502 - RNA, 21 nt, RNAi-sense strand
ucuucaucacggugcuccguu

SEQ ID NO: 7503 - RNA, 21 nt, RNAi-antisense strand
cggagcaccgugaugaagauu

SEQ ID NO: 7504 - DNA, 21 bp, Homo sapiens
caagctgaccgagttcctgca

SEQ ID NO: 7505 - RNA, 21 nt, RNAi-sense strand
agcugaccgaguuccugcauu

SEQ ID NO: 7506 - RNA, 21 nt, RNAi-antisense strand
ugcaggaacucggucagcuuu

SEQ ID NO: 7507 - DNA, 21 bp, Homo sapiens
cactacctccgaaacctgctc

SEQ ID NO: 7508 - RNA, 21 nt, RNAi-sense strand
cuaccuccgaaaccugcucuu

SEQ ID NO: 7509 - RNA, 21 nt, RNAi-antisense strand
gagcagguuucggagguaguu

SEQ ID NO: 7510 - DNA, 21 bp, Homo sapiens
caggtgcaggagcacatcctg

SEQ ID NO: 7511 - RNA, 21 nt, RNAi-sense strand
ggugcaggagcacauccuguu

SEQ ID NO: 7512 - RNA, 21 nt, RNAi-antisense strand
caggaugugcuccugcaccuu

SEQ ID NO: 7513 - DNA, 21 bp, Homo sapiens
caggagcacatcctggaggtg

SEQ ID NO: 7514 - RNA, 21 nt, RNAi-sense strand
ggagcacauccuggagguguu

SEQ ID NO: 7515 - RNA, 21 nt, RNAi-antisense strand
caccuccaggaugugcuccuu

SEQ ID NO: 7516 - DNA, 21 bp, Homo sapiens
cacatcctggaggtggagcgt

SEQ ID NO: 7517 - RNA, 21 nt, RNAi-sense strand
cauccuggagguggagcguuu

SEQ ID NO: 7518 - RNA, 21 nt, RNAi-antisense strand
acgcuccaccuccaggauguu

SEQ ID NO: 7519 - DNA, 21 bp, Homo sapiens
cacctggtgctccttcaagag

SEQ ID NO: 7520 - RNA, 21 nt, RNAi-sense strand
ccuggugcuccuucaagaguu

SEQ ID NO: 7521 - RNA, 21 nt, RNAi-antisense strand
cucuugaaggagcaccagguu

SEQ ID NO: 7522 - DNA, 21 bp, Homo sapiens
caagagtacttcgacgagtcg

SEQ ID NO: 7523 - RNA, 21 nt, RNAi-sense strand
agaguacuucgacgagucguu

SEQ ID NO: 7524 - RNA, 21 nt, RNAi-antisense strand
cgacucgucgaaguacucuuu

SEQ ID NO: 7525 - DNA, 21 bp, Homo sapiens
caccgcctggaacatgctgga

SEQ ID NO: 7526 - RNA, 21 nt, RNAi-sense strand
ccgccuggaacaugcuggauu

SEQ ID NO: 7527 - RNA, 21 nt, RNAi-antisense strand
uccagcauguuccaggcgguu

SEQ ID NO: 7528 - DNA, 21 bp, Homo sapiens
cacctctaccgccacttcaac

SEQ ID NO: 7529 - RNA, 21 nt, RNAi-sense strand
ccucuaccgccacuucaacuu

SEQ ID NO: 7530 - RNA, 21 nt, RNAi-antisense strand
guugaaguggcgguagagguu

SEQ ID NO: 7531 - DNA, 21 bp, Homo sapiens
cacttcaacgccagcttctgg

SEQ ID NO: 7532 - RNA, 21 nt, RNAi-sense strand
cuucaacgccagcuucugguu

SEQ ID NO: 7533 - RNA, 21 nt, RNAi-antisense strand
ccagaagcuggcguugaaguu

SEQ ID NO: 7534 - DNA, 21 bp, Homo sapiens
caacgccagcttctggcgcaa

SEQ ID NO: 7535 - RNA, 21 nt, RNAi-sense strand
acgccagcuucuggcgcaauu

SEQ ID NO: 7536 - RNA, 21 nt, RNAi-antisense strand
uugcgccagaagcuggcguuu

SEQ ID NO: 7537 - DNA, 21 bp, Homo sapiens
cagcttctggcgcaaggtgga

SEQ ID NO: 7538 - RNA, 21 nt, RNAi-sense strand
gcuucuggcgcaagguggauu

SEQ ID NO: 7539 - RNA, 21 nt, RNAi-antisense strand
uccaccuugcgccagaagcuu

SEQ ID NO: 7540 - DNA, 21 bp, Homo sapiens
caacgagcgcatgcggaccat

SEQ ID NO: 7541 - RNA, 21 nt, RNAi-sense strand
acgagcgcaugcggaccauuu

SEQ ID NO: 7542 - RNA, 21 nt, RNAi-antisense strand
augguccgcaugcgcucguuu

SEQ ID NO: 7543 - DNA, 21 bp, Homo sapiens
catgcggaccatctgcatcga

SEQ ID NO: 7544 - RNA, 21 nt, RNAi-sense strand
ugcggaccaucugcaucgauu

SEQ ID NO: 7545 - RNA, 21 nt, RNAi-antisense strand
ucgaugcagaugguccgcauu

SEQ ID NO: 7546 - DNA, 21 bp, Homo sapiens
catccaggacgaggccatgca

SEQ ID NO: 7547 - RNA, 21 nt, RNAi-sense strand
uccaggacgaggccaugcauu

SEQ ID NO: 7548 - RNA, 21 nt, RNAi-antisense strand
ugcauggccucguccuggauu

SEQ ID NO: 7549 - DNA, 21 bp, Homo sapiens
caacctcaagaagagcatcgg

SEQ ID NO: 7550 - RNA, 21 nt, RNAi-sense strand
accucaagaagagcaucgguu

SEQ ID NO: 7551 - RNA, 21 nt, RNAi-antisense strand
ccgaugcucuucuugagguuu

SEQ ID NO: 7552 - DNA, 21 bp, Homo sapiens
cagtacctgatggacctcggc

SEQ ID NO: 7553 - RNA, 21 nt, RNAi-sense strand
guaccugauggaccucggcuu

SEQ ID NO: 7554 - RNA, 21 nt, RNAi-antisense strand
gccgagguccaucagguacuu

SEQ ID NO: 7555 - DNA, 21 bp, Homo sapiens
caccaagctctggaagttcat

SEQ ID NO: 7556 - RNA, 21 nt, RNAi-sense strand
ccaagcucuggaaguucauuu

SEQ ID NO: 7557 - RNA, 21 nt, RNAi-antisense strand
augaacuuccagagcuugguu

SEQ ID NO: 7558 - DNA, 21 bp, Homo sapiens
caagctctggaagttcattcg

SEQ ID NO: 7559 - RNA, 21 nt, RNAi-sense strand
agcucuggaaguucauucguu

SEQ ID NO: 7560 - RNA, 21 nt, RNAi-antisense strand
cgaaugaacuuccagagcuuu

SEQ ID NO: 7561 - DNA, 21 bp, Homo sapiens
cattcgcgatttcctgcggtg

SEQ ID NO: 7562 - RNA, 21 nt, RNAi-sense strand
uucgcgauuuccugcgguguu

SEQ ID NO: 7563 - RNA, 21 nt, RNAi-antisense strand
caccgcaggaaaucgcgaauu

SEQ ID NO: 7564 - DNA, 21 bp, Homo sapiens
cagaagtaaaggaatttgatg

SEQ ID NO: 7565 - RNA, 21 nt, RNAi-sense strand
gaaguaaaggaauuugauguu

SEQ ID NO: 7566 - RNA, 21 nt, RNAi-antisense strand
caucaaauuccuuuacuucuu

SEQ ID NO: 7567 - DNA, 21 bp, Homo sapiens
gagttggacgtggctcaggca

SEQ ID NO: 7568 - RNA, 21 nt, RNAi-sense strand
guuggacguggcucaggcauu

SEQ ID NO: 7569 - RNA, 21 nt, RNAi-antisense strand
ugccugagccacguccaacuu

SEQ ID NO: 7570 - DNA, 21 bp, Homo sapiens
gagtgcagcggcacagtcatg

SEQ ID NO: 7571 - RNA, 21 nt, RNAi-sense strand
gugcagcggcacagucauguu

SEQ ID NO: 7572 - RNA, 21 nt, RNAi-antisense strand
caugacugugccgcugcacuu

SEQ ID NO: 7573 - DNA, 21 bp, Homo sapiens
gaactcaggctcaagcaatcc

SEQ ID NO: 7574 - RNA, 21 nt, RNAi-sense strand
acucaggcucaagcaauccuu

SEQ ID NO: 7575 - RNA, 21 nt, RNAi-antisense strand
ggauugcuugagccugaguuu

SEQ ID NO: 7576 - DNA, 21 bp, Homo sapiens
gactacaggcatgtgccacca

SEQ ID NO: 7577 - RNA, 21 nt, RNAi-sense strand
cuacaggcaugugccaccauu

SEQ ID NO: 7578 - RNA, 21 nt, RNAi-antisense strand
ugguggcacaugccuguaguu

SEQ ID NO: 7579 - DNA, 21 bp, Homo sapiens
gagatgctgccaccgcagaag

SEQ ID NO: 7580 - RNA, 21 nt, RNAi-sense strand
gaugcugccaccgcagaaguu

SEQ ID NO: 7581 - RNA, 21 nt, RNAi-antisense strand
cuucugcgguggcagcaucuu

SEQ ID NO: 7582 - DNA, 21 bp, Homo sapiens
gatgctgccaccgcagaagaa

SEQ ID NO: 7583 - RNA, 21 nt, RNAi-sense strand
ugcugccaccgcagaagaauu

SEQ ID NO: 7584 - RNA, 21 nt, RNAi-antisense strand
uucuucugcgguggcagcauu

SEQ ID NO: 7585 - DNA, 21 bp, Homo sapiens
gaagacgcacaagacggccag

SEQ ID NO: 7586 - RNA, 21 nt, RNAi-sense strand
agacgcacaagacggccaguu

SEQ ID NO: 7587 - RNA, 21 nt, RNAi-antisense strand
cuggccgucuugugcgucuuu

SEQ ID NO: 7588 - DNA, 21 bp, Homo sapiens
gaagcaccggctcaagttcgc

SEQ ID NO: 7589 - RNA, 21 nt, RNAi-sense strand
agcaccggcucaaguucgcuu

SEQ ID NO: 7590 - RNA, 21 nt, RNAi-antisense strand
gcgaacuugagccggugcuuu

SEQ ID NO: 7591 - DNA, 21 bp, Homo sapiens
gaccaacgccatcttcatcac

SEQ ID NO: 7592 - RNA, 21 nt, RNAi-sense strand
ccaacgccaucuucaucacuu

SEQ ID NO: 7593 - RNA, 21 nt, RNAi-antisense strand
gugaugaagauggcguugguu

SEQ ID NO: 7594 - DNA, 21 bp, Homo sapiens
gagtcctccttccactacttc

SEQ ID NO: 7595 - RNA, 21 nt, RNAi-sense strand
guccuccuuccacuacuucuu

SEQ ID NO: 7596 - RNA, 21 nt, RNAi-antisense strand
gaaguaguggaaggaggacuu

SEQ ID NO: 7597 - DNA, 21 bp, Homo sapiens
gacaagctgaccgagttcctg

SEQ ID NO: 7598 - RNA, 21 nt, RNAi-sense strand
caagcugaccgaguuccuguu

SEQ ID NO: 7599 - RNA, 21 nt, RNAi-antisense strand
caggaacucggucagcuuguu

SEQ ID NO: 7600 - DNA, 21 bp, Homo sapiens
gaaacctgctcttcttcgacc

SEQ ID NO: 7601 - RNA, 21 nt, RNAi-sense strand
aaccugcucuucuucgaccuu

SEQ ID NO: 7602 - RNA, 21 nt, RNAi-antisense strand
ggucgaagaagagcagguuuu

SEQ ID NO: 7603 - DNA, 21 bp, Homo sapiens
gagcacatcctggaggtggag

SEQ ID NO: 7604 - RNA, 21 nt, RNAi-sense strand
gcacauccuggagguggaguu

SEQ ID NO: 7605 - RNA, 21 nt, RNAi-antisense strand
cuccaccuccaggaugugcuu

SEQ ID NO: 7606 - DNA, 21 bp, Homo sapiens
gagtacttcgacgagtcgctg

SEQ ID NO: 7607 - RNA, 21 nt, RNAi-sense strand
guacuucgacgagucgcuguu

SEQ ID NO: 7608 - RNA, 21 nt, RNAi-antisense strand
cagcgacucgucgaaguacuu

SEQ ID NO: 7609 - DNA, 21 bp, Homo sapiens
gagtcgctggtgctgctgaag

SEQ ID NO: 7610 - RNA, 21 nt, RNAi-sense strand
gucgcuggugcugcugaaguu

SEQ ID NO: 7611 - RNA, 21 nt, RNAi-antisense strand
cuucagcagcaccagcgacuu

SEQ ID NO: 7612 - DNA, 21 bp, Homo sapiens
gagctggaggacgtgctctac

SEQ ID NO: 7613 - RNA, 21 nt, RNAi-sense strand
gcuggaggacgugcucuacuu

SEQ ID NO: 7614 - RNA, 21 nt, RNAi-antisense strand
guagagcacguccuccagcuu

SEQ ID NO: 7615 - DNA, 21 bp, Homo sapiens
gaggacgtgctctacttcaag

SEQ ID NO: 7616 - RNA, 21 nt, RNAi-sense strand
ggacgugcucuacuucaaguu

SEQ ID NO: 7617 - RNA, 21 nt, RNAi-antisense strand
cuugaaguagagcacguccuu

SEQ ID NO: 7618 - DNA, 21 bp, Homo sapiens
gacgtgctctacttcaagctc

SEQ ID NO: 7619 - RNA, 21 nt, RNAi-sense strand
cgugcucuacuucaagcucuu

SEQ ID NO: 7620 - RNA, 21 nt, RNAi-antisense strand
gagcuugaaguagagcacguu

SEQ ID NO: 7621 - DNA, 21 bp, Homo sapiens
gagatccagtacctgatggac

SEQ ID NO: 7622 - RNA, 21 nt, RNAi-sense strand
gauccaguaccugauggacuu

SEQ ID NO: 7623 - RNA, 21 nt, RNAi-antisense strand
guccaucagguacuggaucuu

SEQ ID NO: 7624 - DNA, 21 bp, Homo sapiens
gatccagtacctgatggacct

SEQ ID NO: 7625 - RNA, 21 nt, RNAi-sense strand
uccaguaccugauggaccuuu

SEQ ID NO: 7626 - RNA, 21 nt, RNAi-antisense strand
agguccaucagguacuggauu

SEQ ID NO: 7627 - DNA, 21 bp, Homo sapiens
gaagttcattcgcgatttcct

SEQ ID NO: 7628 - RNA, 21 nt, RNAi-sense strand
aguucauucgcgauuuccuuu

SEQ ID NO: 7629 - RNA, 21 nt, RNAi-antisense strand
aggaaaucgcgaaugaacuuu

SEQ ID NO: 7630 - DNA, 21 bp, Homo sapiens
gatttcctgcggtggtgacgt

SEQ ID NO: 7631 - RNA, 21 nt, RNAi-sense strand
uuuccugcgguggugacguuu

SEQ ID NO: 7632 - RNA, 21 nt, RNAi-antisense strand
acgucaccaccgcaggaaauu

SEQ ID NO: 7633 - DNA, 21 bp, Homo sapiens
gaatgttctatttctgcctcc

SEQ ID NO: 7634 - RNA, 21 nt, RNAi-sense strand
auguucuauuucugccuccuu

SEQ ID NO: 7635 - RNA, 21 nt, RNAi-antisense strand
ggaggcagaaauagaacauuu

SEQ ID NO: 7636 - DNA, 21 bp, Homo sapiens
gagacctcagaagtaaaggaa

SEQ ID NO: 7637 - RNA, 21 nt, RNAi-sense strand
gaccucagaaguaaaggaauu

SEQ ID NO: 7638 - RNA, 21 nt, RNAi-antisense strand
uuccuuuacuucugaggucuu

SEQ ID NO: 7639 - DNA, 21 bp, Homo sapiens
gacctcagaagtaaaggaatt

SEQ ID NO: 7640 - RNA, 21 nt, RNAi-sense strand
ccucagaaguaaaggaauuuu

SEQ ID NO: 7641 - RNA, 21 nt, RNAi-antisense strand
aauuccuuuacuucugagguu

SEQ ID NO: 7642 - DNA, 21 bp, Homo sapiens
taactaggactacaggcatgt

SEQ ID NO: 7643 - RNA, 21 nt, RNAi-sense strand
acuaggacuacaggcauguuu

SEQ ID NO: 7644 - RNA, 21 nt, RNAi-antisense strand
acaugccuguaguccuaguuu

SEQ ID NO: 7645 - DNA, 21 bp, Homo sapiens
taggactacaggcatgtgcca

SEQ ID NO: 7646 - RNA, 21 nt, RNAi-sense strand
ggacuacaggcaugugccauu

SEQ ID NO: 7647 - RNA, 21 nt, RNAi-antisense strand
uggcacaugccuguaguccuu

SEQ ID NO: 7648 - DNA, 21 bp, Homo sapiens
tacaggcatgtgccaccacgc

SEQ ID NO: 7649 - RNA, 21 nt, RNAi-sense strand
caggcaugugccaccacgcuu

SEQ ID NO: 7650 - RNA, 21 nt, RNAi-antisense strand
gcgugguggcacaugccuguu

SEQ ID NO: 7651 - DNA, 21 bp, Homo sapiens
tagtttcctgctgctggtgta

SEQ ID NO: 7652 - RNA, 21 nt, RNAi-sense strand
guuuccugcugcugguguauu

SEQ ID NO: 7653 - RNA, 21 nt, RNAi-antisense strand
uacaccagcagcaggaaacuu

SEQ ID NO: 7654 - DNA, 21 bp, Homo sapiens
tacctccgaaacctgctcttc

SEQ ID NO: 7655 - RNA, 21 nt, RNAi-sense strand
ccuccgaaaccugcucuucuu

SEQ ID NO: 7656 - RNA, 21 nt, RNAi-antisense strand
gaagagcagguuucggagguu

SEQ ID NO: 7657 - DNA, 21 bp, Homo sapiens
tacttcgacgagtcgctggtg

SEQ ID NO: 7658 - RNA, 21 nt, RNAi-sense strand
cuucgacgagucgcugguguu

SEQ ID NO: 7659 - RNA, 21 nt, RNAi-antisense strand
caccagcgacucgucgaaguu

SEQ ID NO: 7660 - DNA, 21 bp, Homo sapiens
taccgccacttcaacgccagc

SEQ ID NO: 7661 - RNA, 21 nt, RNAi-sense strand
ccgccacuucaacgccagcuu

SEQ ID NO: 7662 - RNA, 21 nt, RNAi-antisense strand
gcuggcguugaaguggcgguu

SEQ ID NO: 7663 - DNA, 21 bp, Homo sapiens
tacaacctcaagaagagcatc

SEQ ID NO: 7664 - RNA, 21 nt, RNAi-sense strand
caaccucaagaagagcaucuu

SEQ ID NO: 7665 - RNA, 21 nt, RNAi-antisense strand
gaugcucuucuugagguuguu

SEQ ID NO: 7666 - DNA, 21 bp, Homo sapiens
taaccgagatcagtatttaac

SEQ ID NO: 7667 - RNA, 21 nt, RNAi-sense strand
accgagaucaguauuuaacuu

SEQ ID NO: 7668 - RNA, 21 nt, RNAi-antisense strand
guuaaauacugaucucgguuu

SEQ ID NO: 7669 - DNA, 21 bp, Homo sapiens
gaaacctgctcttcttcgacc

SEQ ID NO: 7670 - RNA, 21 nt, RNAi-sense strand
aaccugcucuucuucgaccuu

SEQ ID NO: 7671 - RNA, 21 nt, RNAi-antisense strand
ggucgaagaagagcagguuuu

SEQ ID NO: 7672 - DNA, 21 bp, Homo sapiens
gaggacgtgctctacttcaag

SEQ ID NO: 7673 - RNA, 21 nt, RNAi-sense strand
ggacgugcucuacuucaaguu

SEQ ID NO: 7674 - RNA, 21 nt, RNAi-antisense strand
cuugaaguagagcacguccuu

SEQ ID NO: 7675 - DNA, 21 bp, Homo sapiens
gacgtgctctacttcaagctc

SEQ ID NO: 7676 - RNA, 21 nt, RNAi-sense strand
cgugcucuacuucaagcucuu

SEQ ID NO: 7677 - RNA, 21 nt, RNAi-antisense strand
gagcuugaaguagagcacguu

SEQ ID NO: 7678 - DNA, 21 bp, Homo sapiens
aaacaggtctatgcagctacc

SEQ ID NO: 7679 - RNA, 21 nt, RNAi-sense strand
acaggucuaugcagcuaccuu

SEQ ID NO: 7680 - RNA, 21 nt, RNAi-antisense strand
gguagcugcauagaccuguuu

SEQ ID NO: 7681 - DNA, 21 bp, Homo sapiens
aacaggtctatgcagctacca

SEQ ID NO: 7682 - RNA, 21 nt, RNAi-sense strand
caggucuaugcagcuaccauu

SEQ ID NO: 7683 - RNA, 21 nt, RNAi-antisense strand
ugguagcugcauagaccuguu

SEQ ID NO: 7684 - DNA, 21 bp, Homo sapiens
aatggaatctacgttgacttt

SEQ ID NO: 7685 - RNA, 21 nt, RNAi-sense strand
uggaaucuacguugacuuuuu

SEQ ID NO: 7686 - RNA, 21 nt, RNAi-antisense strand
aaagucaacguagauuccauu

SEQ ID NO: 7687 - DNA, 21 bp, Homo sapiens
aatctacgttgactttagcaa

SEQ ID NO: 7688 - RNA, 21 nt, RNAi-sense strand
ucuacguugacuuuagcaauu

SEQ ID NO: 7689 - RNA, 21 nt, RNAi-antisense strand
uugcuaaagucaacguagauu

SEQ ID NO: 7690 - DNA, 21 bp, Homo sapiens
aacggaacaacctgttaagaa

SEQ ID NO: 7691 - RNA, 21 nt, RNAi-sense strand
cggaacaaccuguuaagaauu

SEQ ID NO: 7692 - RNA, 21 nt, RNAi-antisense strand
uucuuaacagguuguuccguu

SEQ ID NO: 7693 - DNA, 21 bp, Homo sapiens
aacaacctgttaagaagaaca

SEQ ID NO: 7694 - RNA, 21 nt, RNAi-sense strand
caaccuguuaagaagaacauu

SEQ ID NO: 7695 - RNA, 21 nt, RNAi-antisense strand
uguucuucuuaacagguuguu

SEQ ID NO: 7696 - DNA, 21 bp, Homo sapiens
aacctgttaagaagaacactc

SEQ ID NO: 7697 - RNA, 21 nt, RNAi-sense strand
ccuguuaagaagaacacucuu

SEQ ID NO: 7698 - RNA, 21 nt, RNAi-antisense strand
gaguguucuucuuaacagguu

SEQ ID NO: 7699 - DNA, 21 bp, Homo sapiens
aaatagcttgcattgttcttc

SEQ ID NO: 7700 - RNA, 21 nt, RNAi-sense strand
auagcuugcauuguucuucuu

SEQ ID NO: 7701 - RNA, 21 nt, RNAi-antisense strand
gaagaacaaugcaagcuauuu

SEQ ID NO: 7702 - DNA, 21 bp, Homo sapiens
aatagcttgcattgttcttct

SEQ ID NO: 7703 - RNA, 21 nt, RNAi-sense strand
uagcuugcauuguucuucuuu

SEQ ID NO: 7704 - RNA, 21 nt, RNAi-antisense strand
agaagaacaaugcaagcuauu

SEQ ID NO: 7705 - DNA, 21 bp, Homo sapiens
aaagcaaggcagctgcaggaa

SEQ ID NO: 7706 - RNA, 21 nt, RNAi-sense strand
agcaaggcagcugcaggaauu

SEQ ID NO: 7707 - RNA, 21 nt, RNAi-antisense strand
uuccugcagcugccuugcuuu

SEQ ID NO: 7708 - DNA, 21 bp, Homo sapiens
aagcaaggcagctgcaggaag

SEQ ID NO: 7709 - RNA, 21 nt, RNAi-sense strand
gcaaggcagcugcaggaaguu

SEQ ID NO: 7710 - RNA, 21 nt, RNAi-antisense strand
cuuccugcagcugccuugcuu

SEQ ID NO: 7711 - DNA, 21 bp, Homo sapiens
aaggcagctgcaggaagaagt

SEQ ID NO: 7712 - RNA, 21 nt, RNAi-sense strand
ggcagcugcaggaagaaguuu

SEQ ID NO: 7713 - RNA, 21 nt, RNAi-antisense strand
acuucuuccugcagcugccuu

SEQ ID NO: 7714 - DNA, 21 bp, Homo sapiens
aagaagtgctttgatgcatca

SEQ ID NO: 7715 - RNA, 21 nt, RNAi-sense strand
gaagugcuuugaugcaucauu

SEQ ID NO: 7716 - RNA, 21 nt, RNAi-antisense strand
ugaugcaucaaagcacuucuu

SEQ ID NO: 7717 - DNA, 21 bp, Homo sapiens
aagtgctttgatgcatcattt

SEQ ID NO: 7718 - RNA, 21 nt, RNAi-sense strand
gugcuuugaugcaucauuuuu

SEQ ID NO: 7719 - RNA, 21 nt, RNAi-antisense strand
aaaugaugcaucaaagcacuu

SEQ ID NO: 7720 - DNA, 21 bp, Homo sapiens
aactgccggtgtgatgtggca

SEQ ID NO: 7721 - RNA, 21 nt, RNAi-sense strand
cugccggugugauguggcauu

SEQ ID NO: 7722 - RNA, 21 nt, RNAi-antisense strand
ugccacaucacaccggcaguu

SEQ ID NO: 7723 - DNA, 21 bp, Homo sapiens
aaagaccgaggtgattgctgc

SEQ ID NO: 7724 - RNA, 21 nt, RNAi-sense strand
agaccgaggugauugcugcuu

SEQ ID NO: 7725 - RNA, 21 nt, RNAi-antisense strand
gcagcaaucaccucggucuuu

SEQ ID NO: 7726 - DNA, 21 bp, Homo sapiens
aagaccgaggtgattgctgct

SEQ ID NO: 7727 - RNA, 21 nt, RNAi-sense strand
gaccgaggugauugcugcuuu

SEQ ID NO: 7728 - RNA, 21 nt, RNAi-antisense strand
agcagcaaucaccucggucuu

SEQ ID NO: 7729 - DNA, 21 bp, Homo sapiens
aagacacctgtgtggaatcaa

SEQ ID NO: 7730 - RNA, 21 nt, RNAi-sense strand
gacaccuguguggaaucaauu

SEQ ID NO: 7731 - RNA, 21 nt, RNAi-antisense strand
uugauuccacacaggugucuu

SEQ ID NO: 7732 - DNA, 21 bp, Homo sapiens
aatcaactcgaatatggatgt

SEQ ID NO: 7733 - RNA, 21 nt, RNAi-sense strand
ucaacucgaauauggauguuu

SEQ ID NO: 7734 - RNA, 21 nt, RNAi-antisense strand
acauccauauucgaguugauu

SEQ ID NO: 7735 - DNA, 21 bp, Homo sapiens
aactcgaatatggatgtgcaa

SEQ ID NO: 7736 - RNA, 21 nt, RNAi-sense strand
cucgaauauggaugugcaauu

SEQ ID NO: 7737 - RNA, 21 nt, RNAi-antisense strand
uugcacauccauauucgaguu

SEQ ID NO: 7738 - DNA, 21 bp, Homo sapiens
aataaatttcgttgtggagag

SEQ ID NO: 7739 - RNA, 21 nt, RNAi-sense strand
uaaauuucguuguggagaguu

SEQ ID NO: 7740 - RNA, 21 nt, RNAi-antisense strand
cucuccacaacgaaauuuauu

SEQ ID NO: 7741 - DNA, 21 bp, Homo sapiens
aaatttcgttgtggagagacc

SEQ ID NO: 7742 - RNA, 21 nt, RNAi-sense strand
auuucguuguggagagaccuu

SEQ ID NO: 7743 - RNA, 21 nt, RNAi-antisense strand
ggucucuccacaacgaaauuu

SEQ ID NO: 7744 - DNA, 21 bp, Homo sapiens
aatttcgttgtggagagacca

SEQ ID NO: 7745 - RNA, 21 nt, RNAi-sense strand
uuucguuguggagagaccauu

SEQ ID NO: 7746 - RNA, 21 nt, RNAi-antisense strand
uggucucuccacaacgaaauu

SEQ ID NO: 7747 - DNA, 21 bp, Homo sapiens
aagaaagattgctgtgctgac

SEQ ID NO: 7748 - RNA, 21 nt, RNAi-sense strand
gaaagauugcugugcugacuu

SEQ ID NO: 7749 - RNA, 21 nt, RNAi-antisense strand
gucagcacagcaaucuuucuu

SEQ ID NO: 7750 - DNA, 21 bp, Homo sapiens
aaagattgctgtgctgactat

SEQ ID NO: 7751 - RNA, 21 nt, RNAi-sense strand
agauugcugugcugacuauuu

SEQ ID NO: 7752 - RNA, 21 nt, RNAi-antisense strand
auagucagcacagcaaucuuu

SEQ ID NO: 7753 - DNA, 21 bp, Homo sapiens
aagattgctgtgctgactata

SEQ ID NO: 7754 - RNA, 21 nt, RNAi-sense strand
gauugcugugcugacuauauu

SEQ ID NO: 7755 - RNA, 21 nt, RNAi-antisense strand
uauagucagcacagcaaucuu

SEQ ID NO: 7756 - DNA, 21 bp, Homo sapiens
aagagtgtttgccaaggagaa

SEQ ID NO: 7757 - RNA, 21 nt, RNAi-sense strand
gaguguuugccaaggagaauu

SEQ ID NO: 7758 - RNA, 21 nt, RNAi-antisense strand
uucuccuuggcaaacacucuu

SEQ ID NO: 7759 - DNA, 21 bp, Homo sapiens
aaggagaaacctcatggctgg

SEQ ID NO: 7760 - RNA, 21 nt, RNAi-sense strand
ggagaaaccucauggcugguu

SEQ ID NO: 7761 - RNA, 21 nt, RNAi-antisense strand
ccagccaugagguuucuccuu

SEQ ID NO: 7762 - DNA, 21 bp, Homo sapiens
aaacctcatggctggaagaaa

SEQ ID NO: 7763 - RNA, 21 nt, RNAi-sense strand
accucauggcuggaagaaauu

SEQ ID NO: 7764 - RNA, 21 nt, RNAi-antisense strand
uuucuuccagccaugagguuu

SEQ ID NO: 7765 - DNA, 21 bp, Homo sapiens
aatacatgagagctatgtatc

SEQ ID NO: 7766 - RNA, 21 nt, RNAi-sense strand
uacaugagagcuauguaucuu

SEQ ID NO: 7767 - RNA, 21 nt, RNAi-antisense strand
gauacauagcucucauguauu

SEQ ID NO: 7768 - DNA, 21 bp, Homo sapiens
aaatcattacaccattgtcac

SEQ ID NO: 7769 - RNA, 21 nt, RNAi-sense strand
aucauuacaccauugucacuu

SEQ ID NO: 7770 - RNA, 21 nt, RNAi-antisense strand
gugacaaugguguaaugauuu

SEQ ID NO: 7771 - DNA, 21 bp, Homo sapiens
aatcattacaccattgtcacg

SEQ ID NO: 7772 - RNA, 21 nt, RNAi-sense strand
ucauuacaccauugucacguu

SEQ ID NO: 7773 - RNA, 21 nt, RNAi-antisense strand
cgugacaaugguguaaugauu

SEQ ID NO: 7774 - DNA, 21 bp, Homo sapiens
aaataatccagcctggtggca

SEQ ID NO: 7775 - RNA, 21 nt, RNAi-sense strand
auaauccagccugguggcauu

SEQ ID NO: 7776 - RNA, 21 nt, RNAi-antisense strand
ugccaccaggcuggauuauuu

SEQ ID NO: 7777 - DNA, 21 bp, Homo sapiens
aataatccagcctggtggcat

SEQ ID NO: 7778 - RNA, 21 nt, RNAi-sense strand
uaauccagccugguggcauuu

SEQ ID NO: 7779 - RNA, 21 nt, RNAi-antisense strand
augccaccaggcuggauuauu

SEQ ID NO: 7780 - DNA, 21 bp, Homo sapiens
aaccaatgtggctgacagcaa

SEQ ID NO: 7781 - RNA, 21 nt, RNAi-sense strand
ccaauguggcugacagcaauu

SEQ ID NO: 7782 - RNA, 21 nt, RNAi-antisense strand
uugcugucagccacauugguu

SEQ ID NO: 7783 - DNA, 21 bp, Homo sapiens
aatgtggctgacagcaatgta

SEQ ID NO: 7784 - RNA, 21 nt, RNAi-sense strand
uguggcugacagcaauguauu

SEQ ID NO: 7785 - RNA, 21 nt, RNAi-antisense strand
uacauugcugucagccacauu

SEQ ID NO: 7786 - DNA, 21 bp, Homo sapiens
aagtggctataaatggctcct

SEQ ID NO: 7787 - RNA, 21 nt, RNAi-sense strand
guggcuauaaauggcuccuuu

SEQ ID NO: 7788 - RNA, 21 nt, RNAi-antisense strand
aggagccauuuauagccacuu

SEQ ID NO: 7789 - DNA, 21 bp, Homo sapiens
aaatggctcctttccttccat

SEQ ID NO: 7790 - RNA, 21 nt, RNAi-sense strand
auggcuccuuuccuuccauuu

SEQ ID NO: 7791 - RNA, 21 nt, RNAi-antisense strand
auggaaggaaaggagccauuu

SEQ ID NO: 7792 - DNA, 21 bp, Homo sapiens
aatggctcctttccttccata

SEQ ID NO: 7793 - RNA, 21 nt, RNAi-sense strand
uggcuccuuuccuuccauauu

SEQ ID NO: 7794 - RNA, 21 nt, RNAi-antisense strand
uauggaaggaaaggagccauu

SEQ ID NO: 7795 - DNA, 21 bp, Homo sapiens
aagagaggatttctacactgt

SEQ ID NO: 7796 - RNA, 21 nt, RNAi-sense strand
gagaggauuucuacacuguuu

SEQ ID NO: 7797 - RNA, 21 nt, RNAi-antisense strand
acaguguagaaauccucucuu

SEQ ID NO: 7798 - DNA, 21 bp, Homo sapiens
aagaacctgattcctctggac

SEQ ID NO: 7799 - RNA, 21 nt, RNAi-sense strand
gaaccugauuccucuggacuu

SEQ ID NO: 7800 - RNA, 21 nt, RNAi-antisense strand
guccagaggaaucagguucuu

SEQ ID NO: 7801 - DNA, 21 bp, Homo sapiens
aacctgattcctctggacatg

SEQ ID NO: 7802 - RNA, 21 nt, RNAi-sense strand
ccugauuccucuggacauguu

SEQ ID NO: 7803 - RNA, 21 nt, RNAi-antisense strand
cauguccagaggaaucagguu

SEQ ID NO: 7804 - DNA, 21 bp, Homo sapiens
aattaaagccttacaggtagt

SEQ ID NO: 7805 - RNA, 21 nt, RNAi-sense strand
uuaaagccuuacagguaguuu

SEQ ID NO: 7806 - RNA, 21 nt, RNAi-antisense strand
acuaccuguaaggcuuuaauu

SEQ ID NO: 7807 - DNA, 21 bp, Homo sapiens
aaagccttacaggtagtagat

SEQ ID NO: 7808 - RNA, 21 nt, RNAi-sense strand
agccuuacagguaguagauuu

SEQ ID NO: 7809 - RNA, 21 nt, RNAi-antisense strand
aucuacuaccuguaaggcuuu

SEQ ID NO: 7810 - DNA, 21 bp, Homo sapiens
aagccttacaggtagtagatc

SEQ ID NO: 7811 - RNA, 21 nt, RNAi-sense strand
gccuuacagguaguagaucuu

SEQ ID NO: 7812 - RNA, 21 nt, RNAi-antisense strand
gaucuacuaccuguaaggcuu

SEQ ID NO: 7813 - DNA, 21 bp, Homo sapiens
aaggcctgaagcagcggaatt

SEQ ID NO: 7814 - RNA, 21 nt, RNAi-sense strand
ggccugaagcagcggaauuuu

SEQ ID NO: 7815 - RNA, 21 nt, RNAi-antisense strand
aauuccgcugcuucaggccuu

SEQ ID NO: 7816 - DNA, 21 bp, Homo sapiens
aagcagcggaatttgcacaac

SEQ ID NO: 7817 - RNA, 21 nt, RNAi-sense strand
gcagcggaauuugcacaacuu

SEQ ID NO: 7818 - RNA, 21 nt, RNAi-antisense strand
guugugcaaauuccgcugcuu

SEQ ID NO: 7819 - DNA, 21 bp, Homo sapiens
aatttgcacaactgtgtcaat

SEQ ID NO: 7820 - RNA, 21 nt, RNAi-sense strand
uuugcacaacugugucaauuu

SEQ ID NO: 7821 - RNA, 21 nt, RNAi-antisense strand
auugacacaguugugcaaauu

SEQ ID NO: 7822 - DNA, 21 bp, Homo sapiens
aactgtgtcaatatcatcctt

SEQ ID NO: 7823 - RNA, 21 nt, RNAi-sense strand
cugugucaauaucauccuuuu

SEQ ID NO: 7824 - RNA, 21 nt, RNAi-antisense strand
aaggaugauauugacacaguu

SEQ ID NO: 7825 - DNA, 21 bp, Homo sapiens
aatatcatccttctggctgac

SEQ ID NO: 7826 - RNA, 21 nt, RNAi-sense strand
uaucauccuucuggcugacuu

SEQ ID NO: 7827 - RNA, 21 nt, RNAi-antisense strand
gucagccagaaggaugauauu

SEQ ID NO: 7828 - DNA, 21 bp, Homo sapiens
aatggaccagacttattgtaa

SEQ ID NO: 7829 - RNA, 21 nt, RNAi-sense strand
uggaccagacuuauuguaauu

SEQ ID NO: 7830 - RNA, 21 nt, RNAi-antisense strand
uuacaauaagucugguccauu

SEQ ID NO: 7831 - DNA, 21 bp, Homo sapiens
aacaagatggaatacatgact

SEQ ID NO: 7832 - RNA, 21 nt, RNAi-sense strand
caagauggaauacaugacuuu

SEQ ID NO: 7833 - RNA, 21 nt, RNAi-antisense strand
agucauguauuccaucuuguu

SEQ ID NO: 7834 - DNA, 21 bp, Homo sapiens
aagatggaatacatgactgat

SEQ ID NO: 7835 - RNA, 21 nt, RNAi-sense strand
gauggaauacaugacugauuu

SEQ ID NO: 7836 - RNA, 21 nt, RNAi-antisense strand
aucagucauguauuccaucuu

SEQ ID NO: 7837 - DNA, 21 bp, Homo sapiens
aaacttcttctacatgtacga

SEQ ID NO: 7838 - RNA, 21 nt, RNAi-sense strand
acuucuucuacauguacgauu

SEQ ID NO: 7839 - RNA, 21 nt, RNAi-antisense strand
ucguacauguagaagaaguuu

SEQ ID NO: 7840 - DNA, 21 bp, Homo sapiens
aacttcttctacatgtacgaa

SEQ ID NO: 7841 - RNA, 21 nt, RNAi-sense strand
cuucuucuacauguacgaauu

SEQ ID NO: 7842 - RNA, 21 nt, RNAi-antisense strand
uucguacauguagaagaaguu

SEQ ID NO: 7843 - DNA, 21 bp, Homo sapiens
aattgttagaaacctcagttg

SEQ ID NO: 7844 - RNA, 21 nt, RNAi-sense strand
uuguuagaaaccucaguuguu

SEQ ID NO: 7845 - RNA, 21 nt, RNAi-antisense strand
caacugagguuucuaacaauu

SEQ ID NO: 7846 - DNA, 21 bp, Homo sapiens
aaacctgatcagcatttcaag

SEQ ID NO: 7847 - RNA, 21 nt, RNAi-sense strand
accugaucagcauuucaaguu

SEQ ID NO: 7848 - RNA, 21 nt, RNAi-antisense strand
cuugaaaugcugaucagguuu

SEQ ID NO: 7849 - DNA, 21 bp, Homo sapiens
aacctgatcagcatttcaagc

SEQ ID NO: 7850 - RNA, 21 nt, RNAi-sense strand
ccugaucagcauuucaagcuu

SEQ ID NO: 7851 - RNA, 21 nt, RNAi-antisense strand
gcuugaaaugcugaucagguu

SEQ ID NO: 7852 - DNA, 21 bp, Homo sapiens
aaagcgactgcactatgccaa

SEQ ID NO: 7853 - RNA, 21 nt, RNAi-sense strand
agcgacugcacuaugccaauu

SEQ ID NO: 7854 - RNA, 21 nt, RNAi-antisense strand
uuggcauagugcagucgcuuu

SEQ ID NO: 7855 - DNA, 21 bp, Homo sapiens
aagcgactgcactatgccaag

SEQ ID NO: 7856 - RNA, 21 nt, RNAi-sense strand
gcgacugcacuaugccaaguu

SEQ ID NO: 7857 - RNA, 21 nt, RNAi-antisense strand
cuuggcauagugcagucgcuu

SEQ ID NO: 7858 - DNA, 21 bp, Homo sapiens
aagaacgtcagaatcgacaaa

SEQ ID NO: 7859 - RNA, 21 nt, RNAi-sense strand
gaacgucagaaucgacaaauu

SEQ ID NO: 7860 - RNA, 21 nt, RNAi-antisense strand
uuugucgauucugacguucuu

SEQ ID NO: 7861 - DNA, 21 bp, Homo sapiens
aacgtcagaatcgacaaagtt

SEQ ID NO: 7862 - RNA, 21 nt, RNAi-sense strand
cgucagaaucgacaaaguuuu

SEQ ID NO: 7863 - RNA, 21 nt, RNAi-antisense strand
aacuuugucgauucugacguu

SEQ ID NO: 7864 - DNA, 21 bp, Homo sapiens
aatcgacaaagttcatctctt

SEQ ID NO: 7865 - RNA, 21 nt, RNAi-sense strand
ucgacaaaguucaucucuuuu

SEQ ID NO: 7866 - RNA, 21 nt, RNAi-antisense strand
aagagaugaacuuugucgauu

SEQ ID NO: 7867 - DNA, 21 bp, Homo sapiens
aaagttcatctctttgtggat

SEQ ID NO: 7868 - RNA, 21 nt, RNAi-sense strand
aguucaucucuuuguggauuu

SEQ ID NO: 7869 - RNA, 21 nt, RNAi-antisense strand
auccacaaagagaugaacuuu

SEQ ID NO: 7870 - DNA, 21 bp, Homo sapiens
aagttcatctctttgtggatc

SEQ ID NO: 7871 - RNA, 21 nt, RNAi-sense strand
guucaucucuuuguggaucuu

SEQ ID NO: 7872 - RNA, 21 nt, RNAi-antisense strand
gauccacaaagagaugaacuu

SEQ ID NO: 7873 - DNA, 21 bp, Homo sapiens
aacagtggctggctgttagga

SEQ ID NO: 7874 - RNA, 21 nt, RNAi-sense strand
caguggcuggcuguuaggauu

SEQ ID NO: 7875 - RNA, 21 nt, RNAi-antisense strand
uccuaacagccagccacuguu

SEQ ID NO: 7876 - DNA, 21 bp, Homo sapiens
aaatacaaattgtggaggagg

SEQ ID NO: 7877 - RNA, 21 nt, RNAi-sense strand
auacaaauuguggaggagguu

SEQ ID NO: 7878 - RNA, 21 nt, RNAi-antisense strand
ccuccuccacaauuuguauuu

SEQ ID NO: 7879 - DNA, 21 bp, Homo sapiens
aatacaaattgtggaggaggc

SEQ ID NO: 7880 - RNA, 21 nt, RNAi-sense strand
uacaaauuguggaggaggcuu

SEQ ID NO: 7881 - RNA, 21 nt, RNAi-antisense strand
gccuccuccacaauuuguauu

SEQ ID NO: 7882 - DNA, 21 bp, Homo sapiens
aaattgtggaggaggcaacca

SEQ ID NO: 7883 - RNA, 21 nt, RNAi-sense strand
auuguggaggaggcaaccauu

SEQ ID NO: 7884 - RNA, 21 nt, RNAi-antisense strand
ugguugccuccuccacaauuu

SEQ ID NO: 7885 - DNA, 21 bp, Homo sapiens
aattgtggaggaggcaaccat

SEQ ID NO: 7886 - RNA, 21 nt, RNAi-sense strand
uuguggaggaggcaaccauuu

SEQ ID NO: 7887 - RNA, 21 nt, RNAi-antisense strand
augguugccuccuccacaauu

SEQ ID NO: 7888 - DNA, 21 bp, Homo sapiens
aaccatggttataacaatgag

SEQ ID NO: 7889 - RNA, 21 nt, RNAi-sense strand
ccaugguuauaacaaugaguu

SEQ ID NO: 7890 - RNA, 21 nt, RNAi-antisense strand
cucauuguuauaaccaugguu

SEQ ID NO: 7891 - DNA, 21 bp, Homo sapiens
aacaatgagtttaggagcatg

SEQ ID NO: 7892 - RNA, 21 nt, RNAi-sense strand
caaugaguuuaggagcauguu

SEQ ID NO: 7893 - RNA, 21 nt, RNAi-antisense strand
caugcuccuaaacucauuguu

SEQ ID NO: 7894 - DNA, 21 bp, Homo sapiens
aatgagtttaggagcatggag

SEQ ID NO: 7895 - RNA, 21 nt, RNAi-sense strand
ugaguuuaggagcauggaguu

SEQ ID NO: 7896 - RNA, 21 nt, RNAi-antisense strand
cuccaugcuccuaaacucauu

SEQ ID NO: 7897 - DNA, 21 bp, Homo sapiens
aaagagaagactgaagttgaa

SEQ ID NO: 7898 - RNA, 21 nt, RNAi-sense strand
agagaagacugaaguugaauu

SEQ ID NO: 7899 - RNA, 21 nt, RNAi-antisense strand
uucaacuucagucuucucuuu

SEQ ID NO: 7900 - DNA, 21 bp, Homo sapiens
aagagaagactgaagttgaac

SEQ ID NO: 7901 - RNA, 21 nt, RNAi-sense strand
gagaagacugaaguugaacuu

SEQ ID NO: 7902 - RNA, 21 nt, RNAi-antisense strand
guucaacuucagucuucucuu

SEQ ID NO: 7903 - DNA, 21 bp, Homo sapiens
aagactgaagttgaaccattt

SEQ ID NO: 7904 - RNA, 21 nt, RNAi-sense strand
gacugaaguugaaccauuuuu

SEQ ID NO: 7905 - RNA, 21 nt, RNAi-antisense strand
aaaugguucaacuucagucuu

SEQ ID NO: 7906 - DNA, 21 bp, Homo sapiens
aagtctataacctaatgtgtg

SEQ ID NO: 7907 - RNA, 21 nt, RNAi-sense strand
gucuauaaccuaauguguguu

SEQ ID NO: 7908 - RNA, 21 nt, RNAi-antisense strand
cacacauuagguuauagacuu

SEQ ID NO: 7909 - DNA, 21 bp, Homo sapiens
aacctaatgtgtgatcttcta

SEQ ID NO: 7910 - RNA, 21 nt, RNAi-sense strand
ccuaaugugugaucuucuauu

SEQ ID NO: 7911 - RNA, 21 nt, RNAi-antisense strand
uagaagaucacacauuagguu

SEQ ID NO: 7912 - DNA, 21 bp, Homo sapiens
aatgtgtgatcttctacgcat

SEQ ID NO: 7913 - RNA, 21 nt, RNAi-sense strand
ugugugaucuucuacgcauuu

SEQ ID NO: 7914 - RNA, 21 nt, RNAi-antisense strand
augcguagaagaucacacauu

SEQ ID NO: 7915 - DNA, 21 bp, Homo sapiens
aaccagcaccaaacaatggaa

SEQ ID NO: 7916 - RNA, 21 nt, RNAi-sense strand
ccagcaccaaacaauggaauu

SEQ ID NO: 7917 - RNA, 21 nt, RNAi-antisense strand
uuccauuguuuggugcugguu

SEQ ID NO: 7918 - DNA, 21 bp, Homo sapiens
aaaccatcttctgaaggtgcc

SEQ ID NO: 7919 - RNA, 21 nt, RNAi-sense strand
accaucuucugaaggugccuu

SEQ ID NO: 7920 - RNA, 21 nt, RNAi-antisense strand
ggcaccuucagaagaugguuu

SEQ ID NO: 7921 - DNA, 21 bp, Homo sapiens
aaccatcttctgaaggtgcct

SEQ ID NO: 7922 - RNA, 21 nt, RNAi-sense strand
ccaucuucugaaggugccuuu

SEQ ID NO: 7923 - RNA, 21 nt, RNAi-antisense strand
aggcaccuucagaagaugguu

SEQ ID NO: 7924 - DNA, 21 bp, Homo sapiens
aaatagtactcagctggaaca

SEQ ID NO: 7925 - RNA, 21 nt, RNAi-sense strand
auaguacucagcuggaacauu

SEQ ID NO: 7926 - RNA, 21 nt, RNAi-antisense strand
uguuccagcugaguacuauuu

SEQ ID NO: 7927 - DNA, 21 bp, Homo sapiens
aatagtactcagctggaacaa

SEQ ID NO: 7928 - RNA, 21 nt, RNAi-sense strand
uaguacucagcuggaacaauu

SEQ ID NO: 7929 - RNA, 21 nt, RNAi-antisense strand
uuguuccagcugaguacuauu

SEQ ID NO: 7930 - DNA, 21 bp, Homo sapiens
aacaagtgaatcagatgctaa

SEQ ID NO: 7931 - RNA, 21 nt, RNAi-sense strand
caagugaaucagaugcuaauu

SEQ ID NO: 7932 - RNA, 21 nt, RNAi-antisense strand
uuagcaucugauucacuuguu

SEQ ID NO: 7933 - DNA, 21 bp, Homo sapiens
aagtgaatcagatgctaaatc

SEQ ID NO: 7934 - RNA, 21 nt, RNAi-sense strand
gugaaucagaugcuaaaucuu

SEQ ID NO: 7935 - RNA, 21 nt, RNAi-antisense strand
gauuuagcaucugauucacuu

SEQ ID NO: 7936 - DNA, 21 bp, Homo sapiens
aatcagatgctaaatctcacc

SEQ ID NO: 7937 - RNA, 21 nt, RNAi-sense strand
ucagaugcuaaaucucaccuu

SEQ ID NO: 7938 - RNA, 21 nt, RNAi-antisense strand
ggugagauuuagcaucugauu

SEQ ID NO: 7939 - DNA, 21 bp, Homo sapiens
aagaagaaataacagcaacag

SEQ ID NO: 7940 - RNA, 21 nt, RNAi-sense strand
gaagaaauaacagcaacaguu

SEQ ID NO: 7941 - RNA, 21 nt, RNAi-antisense strand
cuguugcuguuauuucuucuu

SEQ ID NO: 7942 - DNA, 21 bp, Homo sapiens
aagaaataacagcaacagtga

SEQ ID NO: 7943 - RNA, 21 nt, RNAi-sense strand
gaaauaacagcaacagugauu

SEQ ID NO: 7944 - RNA, 21 nt, RNAi-antisense strand
ucacuguugcuguuauuucuu

SEQ ID NO: 7945 - DNA, 21 bp, Homo sapiens
aaataacagcaacagtgaaag

SEQ ID NO: 7946 - RNA, 21 nt, RNAi-sense strand
auaacagcaacagugaaaguu

SEQ ID NO: 7947 - RNA, 21 nt, RNAi-antisense strand
cuuucacuguugcuguuauuu

SEQ ID NO: 7948 - DNA, 21 bp, Homo sapiens
aataacagcaacagtgaaagt

SEQ ID NO: 7949 - RNA, 21 nt, RNAi-sense strand
uaacagcaacagugaaaguuu

SEQ ID NO: 7950 - RNA, 21 nt, RNAi-antisense strand
acuuucacuguugcuguuauu

SEQ ID NO: 7951 - DNA, 21 bp, Homo sapiens
aacagcaacagtgaaagtaaa

SEQ ID NO: 7952 - RNA, 21 nt, RNAi-sense strand
cagcaacagugaaaguaaauu

SEQ ID NO: 7953 - RNA, 21 nt, RNAi-antisense strand
uuuacuuucacuguugcuguu

SEQ ID NO: 7954 - DNA, 21 bp, Homo sapiens
aacagtgaaagtaaatttgcc

SEQ ID NO: 7955 - RNA, 21 nt, RNAi-sense strand
cagugaaaguaaauuugccuu

SEQ ID NO: 7956 - RNA, 21 nt, RNAi-antisense strand
ggcaaauuuacuuucacuguu

SEQ ID NO: 7957 - DNA, 21 bp, Homo sapiens
aagaacgtggaccactgtctc

SEQ ID NO: 7958 - RNA, 21 nt, RNAi-sense strand
gaacguggaccacugucucuu

SEQ ID NO: 7959 - RNA, 21 nt, RNAi-antisense strand
gagacagugguccacguucuu

SEQ ID NO: 7960 - DNA, 21 bp, Homo sapiens
aacgtggaccactgtctcctt

SEQ ID NO: 7961 - RNA, 21 nt, RNAi-sense strand
cguggaccacugucuccuuuu

SEQ ID NO: 7962 - RNA, 21 nt, RNAi-antisense strand
aaggagacagugguccacguu

SEQ ID NO: 7963 - DNA, 21 bp, Homo sapiens
aatatgtcagtggatttggaa

SEQ ID NO: 7964 - RNA, 21 nt, RNAi-sense strand
uaugucaguggauuuggaauu

SEQ ID NO: 7965 - RNA, 21 nt, RNAi-antisense strand
uuccaaauccacugacauauu

SEQ ID NO: 7966 - DNA, 21 bp, Homo sapiens
aatgttccttctatttagcag

SEQ ID NO: 7967 - RNA, 21 nt, RNAi-sense strand
uguuccuucuauuuagcaguu

SEQ ID NO: 7968 - RNA, 21 nt, RNAi-antisense strand
cugcuaaauagaaggaacauu

SEQ ID NO: 7969 - DNA, 21 bp, Homo sapiens
aatagaacatcagatagccaa

SEQ ID NO: 7970 - RNA, 21 nt, RNAi-sense strand
uagaacaucagauagccaauu

SEQ ID NO: 7971 - RNA, 21 nt, RNAi-antisense strand
uuggcuaucugauguucuauu

SEQ ID NO: 7972 - DNA, 21 bp, Homo sapiens
aacatcagatagccaatatga

SEQ ID NO: 7973 - RNA, 21 nt, RNAi-sense strand
caucagauagccaauaugauu

SEQ ID NO: 7974 - RNA, 21 nt, RNAi-antisense strand
ucauauuggcuaucugauguu

SEQ ID NO: 7975 - DNA, 21 bp, Homo sapiens
aattactagcaatttggtacc

SEQ ID NO: 7976 - RNA, 21 nt, RNAi-sense strand
uuacuagcaauuugguaccuu

SEQ ID NO: 7977 - RNA, 21 nt, RNAi-antisense strand
gguaccaaauugcuaguaauu

SEQ ID NO: 7978 - DNA, 21 bp, Homo sapiens
aaacatgccacagaaagaaat

SEQ ID NO: 7979 - RNA, 21 nt, RNAi-sense strand
acaugccacagaaagaaauuu

SEQ ID NO: 7980 - RNA, 21 nt, RNAi-antisense strand
auuucuuucuguggcauguuu

SEQ ID NO: 7981 - DNA, 21 bp, Homo sapiens
aacatgccacagaaagaaatg

SEQ ID NO: 7982 - RNA, 21 nt, RNAi-sense strand
caugccacagaaagaaauguu

SEQ ID NO: 7983 - RNA, 21 nt, RNAi-antisense strand
cauuucuuucuguggcauguu

SEQ ID NO: 7984 - DNA, 21 bp, Homo sapiens
aaagaaatggagtaaatgtgg

SEQ ID NO: 7985 - RNA, 21 nt, RNAi-sense strand
agaaauggaguaaaugugguu

SEQ ID NO: 7986 - RNA, 21 nt, RNAi-antisense strand
ccacauuuacuccauuucuuu

SEQ ID NO: 7987 - DNA, 21 bp, Homo sapiens
aagaaatggagtaaatgtggt

SEQ ID NO: 7988 - RNA, 21 nt, RNAi-sense strand
gaaauggaguaaaugugguuu

SEQ ID NO: 7989 - RNA, 21 nt, RNAi-antisense strand
accacauuuacuccauuucuu

SEQ ID NO: 7990 - DNA, 21 bp, Homo sapiens
aaatggagtaaatgtggttag

SEQ ID NO: 7991 - RNA, 21 nt, RNAi-sense strand
auggaguaaaugugguuaguu

SEQ ID NO: 7992 - RNA, 21 nt, RNAi-antisense strand
cuaaccacauuuacuccauuu

SEQ ID NO: 7993 - DNA, 21 bp, Homo sapiens
aatggagtaaatgtggttagt

SEQ ID NO: 7994 - RNA, 21 nt, RNAi-sense strand
uggaguaaaugugguuaguuu

SEQ ID NO: 7995 - RNA, 21 nt, RNAi-antisense strand
acuaaccacauuuacuccauu

SEQ ID NO: 7996 - DNA, 21 bp, Homo sapiens
aaatgtggttagtggaccaat

SEQ ID NO: 7997 - RNA, 21 nt, RNAi-sense strand
augugguuaguggaccaauuu

SEQ ID NO: 7998 - RNA, 21 nt, RNAi-antisense strand
auugguccacuaaccacauuu

SEQ ID NO: 7999 - DNA, 21 bp, Homo sapiens
aatgtggttagtggaccaata

SEQ ID NO: 8000 - RNA, 21 nt, RNAi-sense strand
ugugguuaguggaccaauauu

SEQ ID NO: 8001 - RNA, 21 nt, RNAi-antisense strand
uauugguccacuaaccacauu

SEQ ID NO: 8002 - DNA, 21 bp, Homo sapiens
aaacatttagccaacactgat

SEQ ID NO: 8003 - RNA, 21 nt, RNAi-sense strand
acauuuagccaacacugauuu

SEQ ID NO: 8004 - RNA, 21 nt, RNAi-antisense strand
aucaguguuggcuaaauguuu

SEQ ID NO: 8005 - DNA, 21 bp, Homo sapiens
aacatttagccaacactgatg

SEQ ID NO: 8006 - RNA, 21 nt, RNAi-sense strand
cauuuagccaacacugauguu

SEQ ID NO: 8007 - RNA, 21 nt, RNAi-antisense strand
caucaguguuggcuaaauguu

SEQ ID NO: 8008 - DNA, 21 bp, Homo sapiens
aacacactactttgtggtgct

SEQ ID NO: 8009 - RNA, 21 nt, RNAi-sense strand
cacacuacuuuguggugcuuu

SEQ ID NO: 8010 - RNA, 21 nt, RNAi-antisense strand
agcaccacaaaguaguguguu

SEQ ID NO: 8011 - DNA, 21 bp, Homo sapiens
aaacaagagccacacaccgga

SEQ ID NO: 8012 - RNA, 21 nt, RNAi-sense strand
acaagagccacacaccggauu

SEQ ID NO: 8013 - RNA, 21 nt, RNAi-antisense strand
uccgguguguggcucuuguuu

SEQ ID NO: 8014 - DNA, 21 bp, Homo sapiens
aacaagagccacacaccggaa

SEQ ID NO: 8015 - RNA, 21 nt, RNAi-sense strand
caagagccacacaccggaauu

SEQ ID NO: 8016 - RNA, 21 nt, RNAi-antisense strand
uuccgguguguggcucuuguu

SEQ ID NO: 8017 - DNA, 21 bp, Homo sapiens
aacgtggagagctgtcctgaa

SEQ ID NO: 8018 - RNA, 21 nt, RNAi-sense strand
cguggagagcuguccugaauu

SEQ ID NO: 8019 - RNA, 21 nt, RNAi-antisense strand
uucaggacagcucuccacguu

SEQ ID NO: 8020 - DNA, 21 bp, Homo sapiens
aaggtaaaccagaagctcttt

SEQ ID NO: 8021 - RNA, 21 nt, RNAi-sense strand
gguaaaccagaagcucuuuuu

SEQ ID NO: 8022 - RNA, 21 nt, RNAi-antisense strand
aaagagcuucugguuuaccuu

SEQ ID NO: 8023 - DNA, 21 bp, Homo sapiens
aagaaagatttacagctcaca

SEQ ID NO: 8024 - RNA, 21 nt, RNAi-sense strand
gaaagauuuacagcucacauu

SEQ ID NO: 8025 - RNA, 21 nt, RNAi-antisense strand
ugugagcuguaaaucuuucuu

SEQ ID NO: 8026 - DNA, 21 bp, Homo sapiens
aaagatttacagctcacattg

SEQ ID NO: 8027 - RNA, 21 nt, RNAi-sense strand
agauuuacagcucacauuguu

SEQ ID NO: 8028 - RNA, 21 nt, RNAi-antisense strand
caaugugagcuguaaaucuuu

SEQ ID NO: 8029 - DNA, 21 bp, Homo sapiens
aagatttacagctcacattgc

SEQ ID NO: 8030 - RNA, 21 nt, RNAi-sense strand
gauuuacagcucacauugcuu

SEQ ID NO: 8031 - RNA, 21 nt, RNAi-antisense strand
gcaaugugagcuguaaaucuu

SEQ ID NO: 8032 - DNA, 21 bp, Homo sapiens
aaagtgcagcctgtctctgaa

SEQ ID NO: 8033 - RNA, 21 nt, RNAi-sense strand
agugcagccugucucugaauu

SEQ ID NO: 8034 - RNA, 21 nt, RNAi-antisense strand
uucagagacaggcugcacuuu

SEQ ID NO: 8035 - DNA, 21 bp, Homo sapiens
aagtgcagcctgtctctgaaa

SEQ ID NO: 8036 - RNA, 21 nt, RNAi-sense strand
gugcagccugucucugaaauu

SEQ ID NO: 8037 - RNA, 21 nt, RNAi-antisense strand
uuucagagacaggcugcacuu

SEQ ID NO: 8038 - DNA, 21 bp, Homo sapiens
caggtctatgcagctaccagg

SEQ ID NO: 8039 - RNA, 21 nt, RNAi-sense strand
ggucuaugcagcuaccagguu

SEQ ID NO: 8040 - RNA, 21 nt, RNAi-antisense strand
ccugguagcugcauagaccuu

SEQ ID NO: 8041 - DNA, 21 bp, Homo sapiens
cagctaccaggacaatggaat

SEQ ID NO: 8042 - RNA, 21 nt, RNAi-sense strand
gcuaccaggacaauggaauuu

SEQ ID NO: 8043 - RNA, 21 nt, RNAi-antisense strand
auuccauuguccugguagcuu

SEQ ID NO: 8044 - DNA, 21 bp, Homo sapiens
caggacaatggaatctacgtt

SEQ ID NO: 8045 - RNA, 21 nt, RNAi-sense strand
ggacaauggaaucuacguuuu

SEQ ID NO: 8046 - RNA, 21 nt, RNAi-antisense strand
aacguagauuccauuguccuu

SEQ ID NO: 8047 - DNA, 21 bp, Homo sapiens
caatggaatctacgttgactt

SEQ ID NO: 8048 - RNA, 21 nt, RNAi-sense strand
auggaaucuacguugacuuuu

SEQ ID NO: 8049 - RNA, 21 nt, RNAi-antisense strand
aagucaacguagauuccauuu

SEQ ID NO: 8050 - DNA, 21 bp, Homo sapiens
caacggaacaacctgttaaga

SEQ ID NO: 8051 - RNA, 21 nt, RNAi-sense strand
acggaacaaccuguuaagauu

SEQ ID NO: 8052 - RNA, 21 nt, RNAi-antisense strand
ucuuaacagguuguuccguuu

SEQ ID NO: 8053 - DNA, 21 bp, Homo sapiens
caacctgttaagaagaacact

SEQ ID NO: 8054 - RNA, 21 nt, RNAi-sense strand
accuguuaagaagaacacuuu

SEQ ID NO: 8055 - RNA, 21 nt, RNAi-antisense strand
aguguucuucuuaacagguuu

SEQ ID NO: 8056 - DNA, 21 bp, Homo sapiens
cattgttcttcttgctttgct

SEQ ID NO: 8057 - RNA, 21 nt, RNAi-sense strand
uuguucuucuugcuuugcuuu

SEQ ID NO: 8058 - RNA, 21 nt, RNAi-antisense strand
agcaaagcaagaagaacaauu

SEQ ID NO: 8059 - DNA, 21 bp, Homo sapiens
catgtcacttggattaggcct

SEQ ID NO: 8060 - RNA, 21 nt, RNAi-sense strand
ugucacuuggauuaggccuuu

SEQ ID NO: 8061 - RNA, 21 nt, RNAi-antisense strand
aggccuaauccaagugacauu

SEQ ID NO: 8062 - DNA, 21 bp, Homo sapiens
caaggcagctgcaggaagaag

SEQ ID NO: 8063 - RNA, 21 nt, RNAi-sense strand
aggcagcugcaggaagaaguu

SEQ ID NO: 8064 - RNA, 21 nt, RNAi-antisense strand
cuucuuccugcagcugccuuu

SEQ ID NO: 8065 - DNA, 21 bp, Homo sapiens
cagctgcaggaagaagtgctt

SEQ ID NO: 8066 - RNA, 21 nt, RNAi-sense strand
gcugcaggaagaagugcuuuu

SEQ ID NO: 8067 - RNA, 21 nt, RNAi-antisense strand
aagcacuucuuccugcagcuu

SEQ ID NO: 8068 - DNA, 21 bp, Homo sapiens
caggaagaagtgctttgatgc

SEQ ID NO: 8069 - RNA, 21 nt, RNAi-sense strand
ggaagaagugcuuugaugcuu

SEQ ID NO: 8070 - RNA, 21 nt, RNAi-antisense strand
gcaucaaagcacuucuuccuu

SEQ ID NO: 8071 - DNA, 21 bp, Homo sapiens
catcatttagaggactggaga

SEQ ID NO: 8072 - RNA, 21 nt, RNAi-sense strand
ucauuuagaggacuggagauu

SEQ ID NO: 8073 - RNA, 21 nt, RNAi-antisense strand
ucuccaguccucuaaaugauu

SEQ ID NO: 8074 - DNA, 21 bp, Homo sapiens
catttagaggactggagaact

SEQ ID NO: 8075 - RNA, 21 nt, RNAi-sense strand
uuuagaggacuggagaacuuu

SEQ ID NO: 8076 - RNA, 21 nt, RNAi-antisense strand
aguucuccaguccucuaaauu

SEQ ID NO: 8077 - DNA, 21 bp, Homo sapiens
catgtaaagaccgaggtgatt

SEQ ID NO: 8078 - RNA, 21 nt, RNAi-sense strand
uguaaagaccgaggugauuuu

SEQ ID NO: 8079 - RNA, 21 nt, RNAi-antisense strand
aaucaccucggucuuuacauu

SEQ ID NO: 8080 - DNA, 21 bp, Homo sapiens
cacctgtgtggaatcaactcg

SEQ ID NO: 8081 - RNA, 21 nt, RNAi-sense strand
ccuguguggaaucaacucguu

SEQ ID NO: 8082 - RNA, 21 nt, RNAi-antisense strand
cgaguugauuccacacagguu

SEQ ID NO: 8083 - DNA, 21 bp, Homo sapiens
caactcgaatatggatgtgca

SEQ ID NO: 8084 - RNA, 21 nt, RNAi-sense strand
acucgaauauggaugugcauu

SEQ ID NO: 8085 - RNA, 21 nt, RNAi-antisense strand
ugcacauccauauucgaguuu

SEQ ID NO: 8086 - DNA, 21 bp, Homo sapiens
caataaatttcgttgtggaga

SEQ ID NO: 8087 - RNA, 21 nt, RNAi-sense strand
auaaauuucguuguggagauu

SEQ ID NO: 8088 - RNA, 21 nt, RNAi-antisense strand
ucuccacaacgaaauuuauuu

SEQ ID NO: 8089 - DNA, 21 bp, Homo sapiens
cagattagaggccagcctttg

SEQ ID NO: 8090 - RNA, 21 nt, RNAi-sense strand
gauuagaggccagccuuuguu

SEQ ID NO: 8091 - RNA, 21 nt, RNAi-antisense strand
caaaggcuggccucuaaucuu

SEQ ID NO: 8092 - DNA, 21 bp, Homo sapiens
cagcctttgctcttgttcaga

SEQ ID NO: 8093 - RNA, 21 nt, RNAi-sense strand
gccuuugcucuuguucagauu

SEQ ID NO: 8094 - RNA, 21 nt, RNAi-antisense strand
ucugaacaagagcaaaggcuu

SEQ ID NO: 8095 - DNA, 21 bp, Homo sapiens
cagatgactgtttgcagaaga

SEQ ID NO: 8096 - RNA, 21 nt, RNAi-sense strand
gaugacuguuugcagaagauu

SEQ ID NO: 8097 - RNA, 21 nt, RNAi-antisense strand
ucuucugcaaacagucaucuu

SEQ ID NO: 8098 - DNA, 21 bp, Homo sapiens
cagaagaaagattgctgtgct

SEQ ID NO: 8099 - RNA, 21 nt, RNAi-sense strand
gaagaaagauugcugugcuuu

SEQ ID NO: 8100 - RNA, 21 nt, RNAi-antisense strand
agcacagcaaucuuucuucuu

SEQ ID NO: 8101 - DNA, 21 bp, Homo sapiens
caaggagaaacctcatggctg

SEQ ID NO: 8102 - RNA, 21 nt, RNAi-sense strand
aggagaaaccucauggcuguu

SEQ ID NO: 8103 - RNA, 21 nt, RNAi-antisense strand
cagccaugagguuucuccuuu

SEQ ID NO: 8104 - DNA, 21 bp, Homo sapiens
catgagagctatgtatcctac

SEQ ID NO: 8105 - RNA, 21 nt, RNAi-sense strand
ugagagcuauguauccuacuu

SEQ ID NO: 8106 - RNA, 21 nt, RNAi-antisense strand
guaggauacauagcucucauu

SEQ ID NO: 8107 - DNA, 21 bp, Homo sapiens
caaatcattacaccattgtca

SEQ ID NO: 8108 - RNA, 21 nt, RNAi-sense strand
aaucauuacaccauugucauu

SEQ ID NO: 8109 - RNA, 21 nt, RNAi-antisense strand
ugacaaugguguaaugauuuu

SEQ ID NO: 8110 - DNA, 21 bp, Homo sapiens
cagagtcacatggcatcattg

SEQ ID NO: 8111 - RNA, 21 nt, RNAi-sense strand
gagucacauggcaucauuguu

SEQ ID NO: 8112 - RNA, 21 nt, RNAi-antisense strand
caaugaugccaugugacucuu

SEQ ID NO: 8113 - DNA, 21 bp, Homo sapiens
cacatggcatcattgacaata

SEQ ID NO: 8114 - RNA, 21 nt, RNAi-sense strand
cauggcaucauugacaauauu

SEQ ID NO: 8115 - RNA, 21 nt, RNAi-antisense strand
uauugucaaugaugccauguu

SEQ ID NO: 8116 - DNA, 21 bp, Homo sapiens
catggcatcattgacaataat

SEQ ID NO: 8117 - RNA, 21 nt, RNAi-sense strand
uggcaucauugacaauaauuu

SEQ ID NO: 8118 - RNA, 21 nt, RNAi-antisense strand
auuauugucaaugaugccauu

SEQ ID NO: 8119 - DNA, 21 bp, Homo sapiens
cactttcttcaaaggaacaaa

SEQ ID NO: 8120 - RNA, 21 nt, RNAi-sense strand
cuuucuucaaaggaacaaauu

SEQ ID NO: 8121 - RNA, 21 nt, RNAi-antisense strand
uuuguuccuuugaagaaaguu

SEQ ID NO: 8122 - DNA, 21 bp, Homo sapiens
caaccaatgtggctgacagca

SEQ ID NO: 8123 - RNA, 21 nt, RNAi-sense strand
accaauguggcugacagcauu

SEQ ID NO: 8124 - RNA, 21 nt, RNAi-antisense strand
ugcugucagccacauugguuu

SEQ ID NO: 8125 - DNA, 21 bp, Homo sapiens
caatgtggctgacagcaatgt

SEQ ID NO: 8126 - RNA, 21 nt, RNAi-sense strand
auguggcugacagcaauguuu

SEQ ID NO: 8127 - RNA, 21 nt, RNAi-antisense strand
acauugcugucagccacauuu

SEQ ID NO: 8128 - DNA, 21 bp, Homo sapiens
cagcaatgtatcaaggtttaa

SEQ ID NO: 8129 - RNA, 21 nt, RNAi-sense strand
gcaauguaucaagguuuaauu

SEQ ID NO: 8130 - RNA, 21 nt, RNAi-antisense strand
uuaaaccuugauacauugcuu

SEQ ID NO: 8131 - DNA, 21 bp, Homo sapiens
cagaagtggctataaatggct

SEQ ID NO: 8132 - RNA, 21 nt, RNAi-sense strand
gaaguggcuauaaauggcuuu

SEQ ID NO: 8133 - RNA, 21 nt, RNAi-antisense strand
agccauuuauagccacuucuu

SEQ ID NO: 8134 - DNA, 21 bp, Homo sapiens
catatacatgccttacaacgg

SEQ ID NO: 8135 - RNA, 21 nt, RNAi-sense strand
uauacaugccuuacaacgguu

SEQ ID NO: 8136 - RNA, 21 nt, RNAi-antisense strand
ccguuguaaggcauguauauu

SEQ ID NO: 8137 - DNA, 21 bp, Homo sapiens
catgccttacaacggaagtgt

SEQ ID NO: 8138 - RNA, 21 nt, RNAi-sense strand
ugccuuacaacggaaguguuu

SEQ ID NO: 8139 - RNA, 21 nt, RNAi-antisense strand
acacuuccguuguaaggcauu

SEQ ID NO: 8140 - DNA, 21 bp, Homo sapiens
catttgaagagaggatttcta

SEQ ID NO: 8141 - RNA, 21 nt, RNAi-sense strand
uuugaagagaggauuucuauu

SEQ ID NO: 8142 - RNA, 21 nt, RNAi-antisense strand
uagaaauccucucuucaaauu

SEQ ID NO: 8143 - DNA, 21 bp, Homo sapiens
catgcaggtggaccagtcagt

SEQ ID NO: 8144 - RNA, 21 nt, RNAi-sense strand
ugcagguggaccagucaguuu

SEQ ID NO: 8145 - RNA, 21 nt, RNAi-antisense strand
acugacugguccaccugcauu

SEQ ID NO: 8146 - DNA, 21 bp, Homo sapiens
caggtggaccagtcagtgcca

SEQ ID NO: 8147 - RNA, 21 nt, RNAi-sense strand
gguggaccagucagugccauu

SEQ ID NO: 8148 - RNA, 21 nt, RNAi-antisense strand
uggcacugacugguccaccuu

SEQ ID NO: 8149 - DNA, 21 bp, Homo sapiens
cagtcagtgccagagtaatta

SEQ ID NO: 8150 - RNA, 21 nt, RNAi-sense strand
gucagugccagaguaauuauu

SEQ ID NO: 8151 - RNA, 21 nt, RNAi-antisense strand
uaauuacucuggcacugacuu

SEQ ID NO: 8152 - DNA, 21 bp, Homo sapiens
cagtgccagagtaattaaagc

SEQ ID NO: 8153 - RNA, 21 nt, RNAi-sense strand
gugccagaguaauuaaagcuu

SEQ ID NO: 8154 - RNA, 21 nt, RNAi-antisense strand
gcuuuaauuacucuggcacuu

SEQ ID NO: 8155 - DNA, 21 bp, Homo sapiens
cagagtaattaaagccttaca

SEQ ID NO: 8156 - RNA, 21 nt, RNAi-sense strand
gaguaauuaaagccuuacauu

SEQ ID NO: 8157 - RNA, 21 nt, RNAi-antisense strand
uguaaggcuuuaauuacucuu

SEQ ID NO: 8158 - DNA, 21 bp, Homo sapiens
cagcggaatttgcacaactgt

SEQ ID NO: 8159 - RNA, 21 nt, RNAi-sense strand
gcggaauuugcacaacuguuu

SEQ ID NO: 8160 - RNA, 21 nt, RNAi-antisense strand
acaguugugcaaauuccgcuu

SEQ ID NO: 8161 - DNA, 21 bp, Homo sapiens
cacaactgtgtcaatatcatc

SEQ ID NO: 8162 - RNA, 21 nt, RNAi-sense strand
caacugugucaauaucaucuu

SEQ ID NO: 8163 - RNA, 21 nt, RNAi-antisense strand
gaugauauugacacaguuguu

SEQ ID NO: 8164 - DNA, 21 bp, Homo sapiens
caactgtgtcaatatcatcct

SEQ ID NO: 8165 - RNA, 21 nt, RNAi-sense strand
acugugucaauaucauccuuu

SEQ ID NO: 8166 - RNA, 21 nt, RNAi-antisense strand
aggaugauauugacacaguuu

SEQ ID NO: 8167 - DNA, 21 bp, Homo sapiens
caatatcatccttctggctga

SEQ ID NO: 8168 - RNA, 21 nt, RNAi-sense strand
auaucauccuucuggcugauu

SEQ ID NO: 8169 - RNA, 21 nt, RNAi-antisense strand
ucagccagaaggaugauauuu

SEQ ID NO: 8170 - DNA, 21 bp, Homo sapiens
catccttctggctgaccatgg

SEQ ID NO: 8171 - RNA, 21 nt, RNAi-sense strand
uccuucuggcugaccaugguu

SEQ ID NO: 8172 - RNA, 21 nt, RNAi-antisense strand
ccauggucagccagaaggauu

SEQ ID NO: 8173 - DNA, 21 bp, Homo sapiens
catggaatggaccagacttat

SEQ ID NO: 8174 - RNA, 21 nt, RNAi-sense strand
uggaauggaccagacuuauuu

SEQ ID NO: 8175 - RNA, 21 nt, RNAi-antisense strand
auaagucugguccauuccauu

SEQ ID NO: 8176 - DNA, 21 bp, Homo sapiens
cagacttattgtaacaagatg

SEQ ID NO: 8177 - RNA, 21 nt, RNAi-sense strand
gacuuauuguaacaagauguu

SEQ ID NO: 8178 - RNA, 21 nt, RNAi-antisense strand
caucuuguuacaauaagucuu

SEQ ID NO: 8179 - DNA, 21 bp, Homo sapiens
caagatggaatacatgactga

SEQ ID NO: 8180 - RNA, 21 nt, RNAi-sense strand
agauggaauacaugacugauu

SEQ ID NO: 8181 - RNA, 21 nt, RNAi-antisense strand
ucagucauguauuccaucuuu

SEQ ID NO: 8182 - DNA, 21 bp, Homo sapiens
catccgagctcataatatacc

SEQ ID NO: 8183 - RNA, 21 nt, RNAi-sense strand
uccgagcucauaauauaccuu

SEQ ID NO: 8184 - RNA, 21 nt, RNAi-antisense strand
gguauauuaugagcucggauu

SEQ ID NO: 8185 - DNA, 21 bp, Homo sapiens
caaagcgactgcactatgcca

SEQ ID NO: 8186 - RNA, 21 nt, RNAi-sense strand
aagcgacugcacuaugccauu

SEQ ID NO: 8187 - RNA, 21 nt, RNAi-antisense strand
uggcauagugcagucgcuuuu

SEQ ID NO: 8188 - DNA, 21 bp, Homo sapiens
cactatgccaagaacgtcaga

SEQ ID NO: 8189 - RNA, 21 nt, RNAi-sense strand
cuaugccaagaacgucagauu

SEQ ID NO: 8190 - RNA, 21 nt, RNAi-antisense strand
ucugacguucuuggcauaguu

SEQ ID NO: 8191 - DNA, 21 bp, Homo sapiens
caagaacgtcagaatcgacaa

SEQ ID NO: 8192 - RNA, 21 nt, RNAi-sense strand
agaacgucagaaucgacaauu

SEQ ID NO: 8193 - RNA, 21 nt, RNAi-antisense strand
uugucgauucugacguucuuu

SEQ ID NO: 8194 - DNA, 21 bp, Homo sapiens
cagaatcgacaaagttcatct

SEQ ID NO: 8195 - RNA, 21 nt, RNAi-sense strand
gaaucgacaaaguucaucuuu

SEQ ID NO: 8196 - RNA, 21 nt, RNAi-antisense strand
agaugaacuuugucgauucuu

SEQ ID NO: 8197 - DNA, 21 bp, Homo sapiens
caaagttcatctctttgtgga

SEQ ID NO: 8198 - RNA, 21 nt, RNAi-sense strand
aaguucaucucuuuguggauu

SEQ ID NO: 8199 - RNA, 21 nt, RNAi-antisense strand
uccacaaagagaugaacuuuu

SEQ ID NO: 8200 - DNA, 21 bp, Homo sapiens
catctctttgtggatcaacag

SEQ ID NO: 8201 - RNA, 21 nt, RNAi-sense strand
ucucuuuguggaucaacaguu

SEQ ID NO: 8202 - RNA, 21 nt, RNAi-antisense strand
cuguugauccacaaagagauu

SEQ ID NO: 8203 - DNA, 21 bp, Homo sapiens
caacagtggctggctgttagg

SEQ ID NO: 8204 - RNA, 21 nt, RNAi-sense strand
acaguggcuggcuguuagguu

SEQ ID NO: 8205 - RNA, 21 nt, RNAi-antisense strand
ccuaacagccagccacuguuu

SEQ ID NO: 8206 - DNA, 21 bp, Homo sapiens
cagtggctggctgttaggagt

SEQ ID NO: 8207 - RNA, 21 nt, RNAi-sense strand
guggcuggcuguuaggaguuu

SEQ ID NO: 8208 - RNA, 21 nt, RNAi-antisense strand
acuccuaacagccagccacuu

SEQ ID NO: 8209 - DNA, 21 bp, Homo sapiens
caaatacaaattgtggaggag

SEQ ID NO: 8210 - RNA, 21 nt, RNAi-sense strand
aauacaaauuguggaggaguu

SEQ ID NO: 8211 - RNA, 21 nt, RNAi-antisense strand
cuccuccacaauuuguauuuu

SEQ ID NO: 8212 - DNA, 21 bp, Homo sapiens
caaattgtggaggaggcaacc

SEQ ID NO: 8213 - RNA, 21 nt, RNAi-sense strand
aauuguggaggaggcaaccuu

SEQ ID NO: 8214 - RNA, 21 nt, RNAi-antisense strand
gguugccuccuccacaauuuu

SEQ ID NO: 8215 - DNA, 21 bp, Homo sapiens
caaccatggttataacaatga

SEQ ID NO: 8216 - RNA, 21 nt, RNAi-sense strand
accaugguuauaacaaugauu

SEQ ID NO: 8217 - RNA, 21 nt, RNAi-antisense strand
ucauuguuauaaccaugguuu

SEQ ID NO: 8218 - DNA, 21 bp, Homo sapiens
caatgagtttaggagcatgga

SEQ ID NO: 8219 - RNA, 21 nt, RNAi-sense strand
augaguuuaggagcauggauu

SEQ ID NO: 8220 - RNA, 21 nt, RNAi-antisense strand
uccaugcuccuaaacucauuu

SEQ ID NO: 8221 - DNA, 21 bp, Homo sapiens
catggaggctatctttctggc

SEQ ID NO: 8222 - RNA, 21 nt, RNAi-sense strand
uggaggcuaucuuucuggcuu

SEQ ID NO: 8223 - RNA, 21 nt, RNAi-antisense strand
gccagaaagauagccuccauu

SEQ ID NO: 8224 - DNA, 21 bp, Homo sapiens
cattcaaccagcaccaaacaa

SEQ ID NO: 8225 - RNA, 21 nt, RNAi-sense strand
uucaaccagcaccaaacaauu

SEQ ID NO: 8226 - RNA, 21 nt, RNAi-antisense strand
uuguuuggugcugguugaauu

SEQ ID NO: 8227 - DNA, 21 bp, Homo sapiens
caaccagcaccaaacaatgga

SEQ ID NO: 8228 - RNA, 21 nt, RNAi-sense strand
accagcaccaaacaauggauu

SEQ ID NO: 8229 - RNA, 21 nt, RNAi-antisense strand
uccauuguuuggugcugguuu

SEQ ID NO: 8230 - DNA, 21 bp, Homo sapiens
catggtagtttaaaccatctt

SEQ ID NO: 8231 - RNA, 21 nt, RNAi-sense strand
ugguaguuuaaaccaucuuuu

SEQ ID NO: 8232 - RNA, 21 nt, RNAi-antisense strand
aagaugguuuaaacuaccauu

SEQ ID NO: 8233 - DNA, 21 bp, Homo sapiens
catgcagaggaggtgtcaaag

SEQ ID NO: 8234 - RNA, 21 nt, RNAi-sense strand
ugcagaggaggugucaaaguu

SEQ ID NO: 8235 - RNA, 21 nt, RNAi-antisense strand
cuuugacaccuccucugcauu

SEQ ID NO: 8236 - DNA, 21 bp, Homo sapiens
cacagagtctcttgactgttt

SEQ ID NO: 8237 - RNA, 21 nt, RNAi-sense strand
cagagucucuugacuguuuuu

SEQ ID NO: 8238 - RNA, 21 nt, RNAi-antisense strand
aaacagucaagagacucuguu

SEQ ID NO: 8239 - DNA, 21 bp, Homo sapiens
cagagtctcttgactgtttct

SEQ ID NO: 8240 - RNA, 21 nt, RNAi-sense strand
gagucucuugacuguuucuuu

SEQ ID NO: 8241 - RNA, 21 nt, RNAi-antisense strand
agaaacagucaagagacucuu

SEQ ID NO: 8242 - DNA, 21 bp, Homo sapiens
cagctggaacaagtgaatcag

SEQ ID NO: 8243 - RNA, 21 nt, RNAi-sense strand
gcuggaacaagugaaucaguu

SEQ ID NO: 8244 - RNA, 21 nt, RNAi-antisense strand
cugauucacuuguuccagcuu

SEQ ID NO: 8245 - DNA, 21 bp, Homo sapiens
caagtgaatcagatgctaaat

SEQ ID NO: 8246 - RNA, 21 nt, RNAi-sense strand
agugaaucagaugcuaaauuu

SEQ ID NO: 8247 - RNA, 21 nt, RNAi-antisense strand
auuuagcaucugauucacuuu

SEQ ID NO: 8248 - DNA, 21 bp, Homo sapiens
caagaagaaataacagcaaca

SEQ ID NO: 8249 - RNA, 21 nt, RNAi-sense strand
agaagaaauaacagcaacauu

SEQ ID NO: 8250 - RNA, 21 nt, RNAi-antisense strand
uguugcuguuauuucuucuuu

SEQ ID NO: 8251 - DNA, 21 bp, Homo sapiens
cagcaacagtgaaagtaaatt

SEQ ID NO: 8252 - RNA, 21 nt, RNAi-sense strand
gcaacagugaaaguaaauuuu

SEQ ID NO: 8253 - RNA, 21 nt, RNAi-antisense strand
aauuuacuuucacuguugcuu

SEQ ID NO: 8254 - DNA, 21 bp, Homo sapiens
caacagtgaaagtaaatttgc

SEQ ID NO: 8255 - RNA, 21 nt, RNAi-sense strand
acagugaaaguaaauuugcuu

SEQ ID NO: 8256 - RNA, 21 nt, RNAi-antisense strand
gcaaauuuacuuucacuguuu

SEQ ID NO: 8257 - DNA, 21 bp, Homo sapiens
cagtgaaagtaaatttgccat

SEQ ID NO: 8258 - RNA, 21 nt, RNAi-sense strand
gugaaaguaaauuugccauuu

SEQ ID NO: 8259 - RNA, 21 nt, RNAi-antisense strand
auggcaaauuuacuuucacuu

SEQ ID NO: 8260 - DNA, 21 bp, Homo sapiens
cagaagaacgtggaccactgt

SEQ ID NO: 8261 - RNA, 21 nt, RNAi-sense strand
gaagaacguggaccacuguuu

SEQ ID NO: 8262 - RNA, 21 nt, RNAi-antisense strand
acagugguccacguucuucuu

SEQ ID NO: 8263 - DNA, 21 bp, Homo sapiens
cactgtctcctttaccacagg

SEQ ID NO: 8264 - RNA, 21 nt, RNAi-sense strand
cugucuccuuuaccacagguu

SEQ ID NO: 8265 - RNA, 21 nt, RNAi-antisense strand
ccugugguaaaggagacaguu

SEQ ID NO: 8266 - DNA, 21 bp, Homo sapiens
catgtggagttcatacacagt

SEQ ID NO: 8267 - RNA, 21 nt, RNAi-sense strand
uguggaguucauacacaguuu

SEQ ID NO: 8268 - RNA, 21 nt, RNAi-antisense strand
acuguguaugaacuccacauu

SEQ ID NO: 8269 - DNA, 21 bp, Homo sapiens
cacggcttcctctatcctcct

SEQ ID NO: 8270 - RNA, 21 nt, RNAi-sense strand
cggcuuccucuauccuccuuu

SEQ ID NO: 8271 - RNA, 21 nt, RNAi-antisense strand
aggaggauagaggaagccguu

SEQ ID NO: 8272 - DNA, 21 bp, Homo sapiens
cagcaatagaacatcagatag

SEQ ID NO: 8273 - RNA, 21 nt, RNAi-sense strand
gcaauagaacaucagauaguu

SEQ ID NO: 8274 - RNA, 21 nt, RNAi-antisense strand
cuaucugauguucuauugcuu

SEQ ID NO: 8275 - DNA, 21 bp, Homo sapiens
caatagaacatcagatagcca

SEQ ID NO: 8276 - RNA, 21 nt, RNAi-sense strand
auagaacaucagauagccauu

SEQ ID NO: 8277 - RNA, 21 nt, RNAi-antisense strand
uggcuaucugauguucuauuu

SEQ ID NO: 8278 - DNA, 21 bp, Homo sapiens
catcagatagccaatatgatg

SEQ ID NO: 8279 - RNA, 21 nt, RNAi-sense strand
ucagauagccaauaugauguu

SEQ ID NO: 8280 - RNA, 21 nt, RNAi-antisense strand
caucauauuggcuaucugauu

SEQ ID NO: 8281 - DNA, 21 bp, Homo sapiens
cagatagccaatatgatgctt

SEQ ID NO: 8282 - RNA, 21 nt, RNAi-sense strand
gauagccaauaugaugcuuuu

SEQ ID NO: 8283 - RNA, 21 nt, RNAi-antisense strand
aagcaucauauuggcuaucuu

SEQ ID NO: 8284 - DNA, 21 bp, Homo sapiens
caatttggtacctatgtatga

SEQ ID NO: 8285 - RNA, 21 nt, RNAi-sense strand
auuugguaccuauguaugauu

SEQ ID NO: 8286 - RNA, 21 nt, RNAi-antisense strand
ucauacauagguaccaaauuu

SEQ ID NO: 8287 - DNA, 21 bp, Homo sapiens
catgccacagaaagaaatgga

SEQ ID NO: 8288 - RNA, 21 nt, RNAi-sense strand
ugccacagaaagaaauggauu

SEQ ID NO: 8289 - RNA, 21 nt, RNAi-antisense strand
uccauuucuuucuguggcauu

SEQ ID NO: 8290 - DNA, 21 bp, Homo sapiens
cacagaaagaaatggagtaaa

SEQ ID NO: 8291 - RNA, 21 nt, RNAi-sense strand
cagaaagaaauggaguaaauu

SEQ ID NO: 8292 - RNA, 21 nt, RNAi-antisense strand
uuuacuccauuucuuucuguu

SEQ ID NO: 8293 - DNA, 21 bp, Homo sapiens
cagaaagaaatggagtaaatg

SEQ ID NO: 8294 - RNA, 21 nt, RNAi-sense strand
gaaagaaauggaguaaauguu

SEQ ID NO: 8295 - RNA, 21 nt, RNAi-antisense strand
cauuuacuccauuucuuucuu

SEQ ID NO: 8296 - DNA, 21 bp, Homo sapiens
caaacatttagccaacactga

SEQ ID NO: 8297 - RNA, 21 nt, RNAi-sense strand
aacauuuagccaacacugauu

SEQ ID NO: 8298 - RNA, 21 nt, RNAi-antisense strand
ucaguguuggcuaaauguuuu

SEQ ID NO: 8299 - DNA, 21 bp, Homo sapiens
catttagccaacactgatgtt

SEQ ID NO: 8300 - RNA, 21 nt, RNAi-sense strand
uuuagccaacacugauguuuu

SEQ ID NO: 8301 - RNA, 21 nt, RNAi-antisense strand
aacaucaguguuggcuaaauu

SEQ ID NO: 8302 - DNA, 21 bp, Homo sapiens
caacacactactttgtggtgc

SEQ ID NO: 8303 - RNA, 21 nt, RNAi-sense strand
acacacuacuuuguggugcuu

SEQ ID NO: 8304 - RNA, 21 nt, RNAi-antisense strand
gcaccacaaaguaguguguuu

SEQ ID NO: 8305 - DNA, 21 bp, Homo sapiens
cacactactttgtggtgctga

SEQ ID NO: 8306 - RNA, 21 nt, RNAi-sense strand
cacuacuuuguggugcugauu

SEQ ID NO: 8307 - RNA, 21 nt, RNAi-antisense strand
ucagcaccacaaaguaguguu

SEQ ID NO: 8308 - DNA, 21 bp, Homo sapiens
cactactttgtggtgctgacc

SEQ ID NO: 8309 - RNA, 21 nt, RNAi-sense strand
cuacuuuguggugcugaccuu

SEQ ID NO: 8310 - RNA, 21 nt, RNAi-antisense strand
ggucagcaccacaaaguaguu

SEQ ID NO: 8311 - DNA, 21 bp, Homo sapiens
caccgacctaccaacgtggag

SEQ ID NO: 8312 - RNA, 21 nt, RNAi-sense strand
ccgaccuaccaacguggaguu

SEQ ID NO: 8313 - RNA, 21 nt, RNAi-antisense strand
cuccacguugguaggucgguu

SEQ ID NO: 8314 - DNA, 21 bp, Homo sapiens
caacgtggagagctgtcctga

SEQ ID NO: 8315 - RNA, 21 nt, RNAi-sense strand
acguggagagcuguccugauu

SEQ ID NO: 8316 - RNA, 21 nt, RNAi-antisense strand
ucaggacagcucuccacguuu

SEQ ID NO: 8317 - DNA, 21 bp, Homo sapiens
caggataaagtgcagcctgtc

SEQ ID NO: 8318 - RNA, 21 nt, RNAi-sense strand
ggauaaagugcagccugucuu

SEQ ID NO: 8319 - RNA, 21 nt, RNAi-antisense strand
gacaggcugcacuuuauccuu

SEQ ID NO: 8320 - DNA, 21 bp, Homo sapiens
gagcctactttattctgataa

SEQ ID NO: 8321 - RNA, 21 nt, RNAi-sense strand
gccuacuuuauucugauaauu

SEQ ID NO: 8322 - RNA, 21 nt, RNAi-antisense strand
uuaucagaauaaaguaggcuu

SEQ ID NO: 8323 - DNA, 21 bp, Homo sapiens
gacaatggaatctacgttgac

SEQ ID NO: 8324 - RNA, 21 nt, RNAi-sense strand
caauggaaucuacguugacuu

SEQ ID NO: 8325 - RNA, 21 nt, RNAi-antisense strand
gucaacguagauuccauuguu

SEQ ID NO: 8326 - DNA, 21 bp, Homo sapiens
gaatctacgttgactttagca

SEQ ID NO: 8327 - RNA, 21 nt, RNAi-sense strand
aucuacguugacuuuagcauu

SEQ ID NO: 8328 - RNA, 21 nt, RNAi-antisense strand
ugcuaaagucaacguagauuu

SEQ ID NO: 8329 - DNA, 21 bp, Homo sapiens
gactttagcaacggaacaacc

SEQ ID NO: 8330 - RNA, 21 nt, RNAi-sense strand
cuuuagcaacggaacaaccuu

SEQ ID NO: 8331 - RNA, 21 nt, RNAi-antisense strand
gguuguuccguugcuaaaguu

SEQ ID NO: 8332 - DNA, 21 bp, Homo sapiens
gaacaacctgttaagaagaac

SEQ ID NO: 8333 - RNA, 21 nt, RNAi-sense strand
acaaccuguuaagaagaacuu

SEQ ID NO: 8334 - RNA, 21 nt, RNAi-antisense strand
guucuucuuaacagguuguuu

SEQ ID NO: 8335 - DNA, 21 bp, Homo sapiens
gatcatgtcacttggattagg

SEQ ID NO: 8336 - RNA, 21 nt, RNAi-sense strand
ucaugucacuuggauuagguu

SEQ ID NO: 8337 - RNA, 21 nt, RNAi-antisense strand
ccuaauccaagugacaugauu

SEQ ID NO: 8338 - DNA, 21 bp, Homo sapiens
gaagaagtgctttgatgcatc

SEQ ID NO: 8339 - RNA, 21 nt, RNAi-sense strand
agaagugcuuugaugcaucuu

SEQ ID NO: 8340 - RNA, 21 nt, RNAi-antisense strand
gaugcaucaaagcacuucuuu

SEQ ID NO: 8341 - DNA, 21 bp, Homo sapiens
gaagtgctttgatgcatcatt

SEQ ID NO: 8342 - RNA, 21 nt, RNAi-sense strand
agugcuuugaugcaucauuuu

SEQ ID NO: 8343 - RNA, 21 nt, RNAi-antisense strand
aaugaugcaucaaagcacuuu

SEQ ID NO: 8344 - DNA, 21 bp, Homo sapiens
gatgcatcatttagaggactg

SEQ ID NO: 8345 - RNA, 21 nt, RNAi-sense strand
ugcaucauuuagaggacuguu

SEQ ID NO: 8346 - RNA, 21 nt, RNAi-antisense strand
caguccucuaaaugaugcauu

SEQ ID NO: 8347 - DNA, 21 bp, Homo sapiens
gaggactggagaactgccggt

SEQ ID NO: 8348 - RNA, 21 nt, RNAi-sense strand
ggacuggagaacugccgguuu

SEQ ID NO: 8349 - RNA, 21 nt, RNAi-antisense strand
accggcaguucuccaguccuu

SEQ ID NO: 8350 - DNA, 21 bp, Homo sapiens
gactggagaactgccggtgtg

SEQ ID NO: 8351 - RNA, 21 nt, RNAi-sense strand
cuggagaacugccgguguguu

SEQ ID NO: 8352 - RNA, 21 nt, RNAi-antisense strand
cacaccggcaguucuccaguu

SEQ ID NO: 8353 - DNA, 21 bp, Homo sapiens
gagaactgccggtgtgatgtg

SEQ ID NO: 8354 - RNA, 21 nt, RNAi-sense strand
gaacugccggugugauguguu

SEQ ID NO: 8355 - RNA, 21 nt, RNAi-antisense strand
cacaucacaccggcaguucuu

SEQ ID NO: 8356 - DNA, 21 bp, Homo sapiens
gaactgccggtgtgatgtggc

SEQ ID NO: 8357 - RNA, 21 nt, RNAi-sense strand
acugccggugugauguggcuu

SEQ ID NO: 8358 - RNA, 21 nt, RNAi-antisense strand
gccacaucacaccggcaguuu

SEQ ID NO: 8359 - DNA, 21 bp, Homo sapiens
gatgtggcatgtaaagaccga

SEQ ID NO: 8360 - RNA, 21 nt, RNAi-sense strand
uguggcauguaaagaccgauu

SEQ ID NO: 8361 - RNA, 21 nt, RNAi-antisense strand
ucggucuuuacaugccacauu

SEQ ID NO: 8362 - DNA, 21 bp, Homo sapiens
gaccgaggtgattgctgctgg

SEQ ID NO: 8363 - RNA, 21 nt, RNAi-sense strand
ccgaggugauugcugcugguu

SEQ ID NO: 8364 - RNA, 21 nt, RNAi-antisense strand
ccagcagcaaucaccucgguu

SEQ ID NO: 8365 - DNA, 21 bp, Homo sapiens
gaagacacctgtgtggaatca

SEQ ID NO: 8366 - RNA, 21 nt, RNAi-sense strand
agacaccuguguggaaucauu

SEQ ID NO: 8367 - RNA, 21 nt, RNAi-antisense strand
ugauuccacacaggugucuuu

SEQ ID NO: 8368 - DNA, 21 bp, Homo sapiens
gacacctgtgtggaatcaact

SEQ ID NO: 8369 - RNA, 21 nt, RNAi-sense strand
caccuguguggaaucaacuuu

SEQ ID NO: 8370 - RNA, 21 nt, RNAi-antisense strand
aguugauuccacacagguguu

SEQ ID NO: 8371 - DNA, 21 bp, Homo sapiens
gaatcaactcgaatatggatg

SEQ ID NO: 8372 - RNA, 21 nt, RNAi-sense strand
aucaacucgaauauggauguu

SEQ ID NO: 8373 - RNA, 21 nt, RNAi-antisense strand
cauccauauucgaguugauuu

SEQ ID NO: 8374 - DNA, 21 bp, Homo sapiens
gatgtgcaataaatttcgttg

SEQ ID NO: 8375 - RNA, 21 nt, RNAi-sense strand
ugugcaauaaauuucguuguu

SEQ ID NO: 8376 - RNA, 21 nt, RNAi-antisense strand
caacgaaauuuauugcacauu

SEQ ID NO: 8377 - DNA, 21 bp, Homo sapiens
gagagaccagattagaggcca

SEQ ID NO: 8378 - RNA, 21 nt, RNAi-sense strand
gagaccagauuagaggccauu

SEQ ID NO: 8379 - RNA, 21 nt, RNAi-antisense strand
uggccucuaaucuggucucuu

SEQ ID NO: 8380 - DNA, 21 bp, Homo sapiens
gagaccagattagaggccagc

SEQ ID NO: 8381 - RNA, 21 nt, RNAi-sense strand
gaccagauuagaggccagcuu

SEQ ID NO: 8382 - RNA, 21 nt, RNAi-antisense strand
gcuggccucuaaucuggucuu

SEQ ID NO: 8383 - DNA, 21 bp, Homo sapiens
gaccagattagaggccagcct

SEQ ID NO: 8384 - RNA, 21 nt, RNAi-sense strand
ccagauuagaggccagccuuu

SEQ ID NO: 8385 - RNA, 21 nt, RNAi-antisense strand
aggcuggccucuaaucugguu

SEQ ID NO: 8386 - DNA, 21 bp, Homo sapiens
gattagaggccagcctttgct

SEQ ID NO: 8387 - RNA, 21 nt, RNAi-sense strand
uuagaggccagccuuugcuuu

SEQ ID NO: 8388 - RNA, 21 nt, RNAi-antisense strand
agcaaaggcuggccucuaauu

SEQ ID NO: 8389 - DNA, 21 bp, Homo sapiens
gaggccagcctttgctcttgt

SEQ ID NO: 8390 - RNA, 21 nt, RNAi-sense strand
ggccagccuuugcucuuguuu

SEQ ID NO: 8391 - RNA, 21 nt, RNAi-antisense strand
acaagagcaaaggcuggccuu

SEQ ID NO: 8392 - DNA, 21 bp, Homo sapiens
gatgactgtttgcagaagaaa

SEQ ID NO: 8393 - RNA, 21 nt, RNAi-sense strand
ugacuguuugcagaagaaauu

SEQ ID NO: 8394 - RNA, 21 nt, RNAi-antisense strand
uuucuucugcaaacagucauu

SEQ ID NO: 8395 - DNA, 21 bp, Homo sapiens
gactgtttgcagaagaaagat

SEQ ID NO: 8396 - RNA, 21 nt, RNAi-sense strand
cuguuugcagaagaaagauuu

SEQ ID NO: 8397 - RNA, 21 nt, RNAi-antisense strand
aucuuucuucugcaaacaguu

SEQ ID NO: 8398 - DNA, 21 bp, Homo sapiens
gaagaaagattgctgtgctga

SEQ ID NO: 8399 - RNA, 21 nt, RNAi-sense strand
agaaagauugcugugcugauu

SEQ ID NO: 8400 - RNA, 21 nt, RNAi-antisense strand
ucagcacagcaaucuuucuuu

SEQ ID NO: 8401 - DNA, 21 bp, Homo sapiens
gaaagattgctgtgctgacta

SEQ ID NO: 8402 - RNA, 21 nt, RNAi-sense strand
aagauugcugugcugacuauu

SEQ ID NO: 8403 - RNA, 21 nt, RNAi-antisense strand
uagucagcacagcaaucuuuu

SEQ ID NO: 8404 - DNA, 21 bp, Homo sapiens
gattgctgtgctgactataag

SEQ ID NO: 8405 - RNA, 21 nt, RNAi-sense strand
uugcugugcugacuauaaguu

SEQ ID NO: 8406 - RNA, 21 nt, RNAi-antisense strand
cuuauagucagcacagcaauu

SEQ ID NO: 8407 - DNA, 21 bp, Homo sapiens
gactataagagtgtttgccaa

SEQ ID NO: 8408 - RNA, 21 nt, RNAi-sense strand
cuauaagaguguuugccaauu

SEQ ID NO: 8409 - RNA, 21 nt, RNAi-antisense strand
uuggcaaacacucuuauaguu

SEQ ID NO: 8410 - DNA, 21 bp, Homo sapiens
gagtgtttgccaaggagaaac

SEQ ID NO: 8411 - RNA, 21 nt, RNAi-sense strand
guguuugccaaggagaaacuu

SEQ ID NO: 8412 - RNA, 21 nt, RNAi-antisense strand
guuucuccuuggcaaacacuu

SEQ ID NO: 8413 - DNA, 21 bp, Homo sapiens
gagaaacctcatggctggaag

SEQ ID NO: 8414 - RNA, 21 nt, RNAi-sense strand
gaaaccucauggcuggaaguu

SEQ ID NO: 8415 - RNA, 21 nt, RNAi-antisense strand
cuuccagccaugagguuucuu

SEQ ID NO: 8416 - DNA, 21 bp, Homo sapiens
gaaacctcatggctggaagaa

SEQ ID NO: 8417 - RNA, 21 nt, RNAi-sense strand
aaccucauggcuggaagaauu

SEQ ID NO: 8418 - RNA, 21 nt, RNAi-antisense strand
uucuuccagccaugagguuuu

SEQ ID NO: 8419 - DNA, 21 bp, Homo sapiens
gacctgccaccagttatcttg

SEQ ID NO: 8420 - RNA, 21 nt, RNAi-sense strand
ccugccaccaguuaucuuguu

SEQ ID NO: 8421 - RNA, 21 nt, RNAi-antisense strand
caagauaacugguggcagguu

SEQ ID NO: 8422 - DNA, 21 bp, Homo sapiens
gatggatttagagctgaatat

SEQ ID NO: 8423 - RNA, 21 nt, RNAi-sense strand
uggauuuagagcugaauauuu

SEQ ID NO: 8424 - RNA, 21 nt, RNAi-antisense strand
auauucagcucuaaauccauu

SEQ ID NO: 8425 - DNA, 21 bp, Homo sapiens
gagagctatgtatcctaccaa

SEQ ID NO: 8426 - RNA, 21 nt, RNAi-sense strand
gagcuauguauccuaccaauu

SEQ ID NO: 8427 - RNA, 21 nt, RNAi-antisense strand
uugguaggauacauagcucuu

SEQ ID NO: 8428 - DNA, 21 bp, Homo sapiens
gagtcacatggcatcattgac

SEQ ID NO: 8429 - RNA, 21 nt, RNAi-sense strand
gucacauggcaucauugacuu

SEQ ID NO: 8430 - RNA, 21 nt, RNAi-antisense strand
gucaaugaugccaugugacuu

SEQ ID NO: 8431 - DNA, 21 bp, Homo sapiens
gacagcaatgtatcaaggttt

SEQ ID NO: 8432 - RNA, 21 nt, RNAi-sense strand
cagcaauguaucaagguuuuu

SEQ ID NO: 8433 - RNA, 21 nt, RNAi-antisense strand
aaaccuugauacauugcuguu

SEQ ID NO: 8434 - DNA, 21 bp, Homo sapiens
gatcagaagtggctataaatg

SEQ ID NO: 8435 - RNA, 21 nt, RNAi-sense strand
ucagaaguggcuauaaauguu

SEQ ID NO: 8436 - RNA, 21 nt, RNAi-antisense strand
cauuuauagccacuucugauu

SEQ ID NO: 8437 - DNA, 21 bp, Homo sapiens
gaagtggctataaatggctcc

SEQ ID NO: 8438 - RNA, 21 nt, RNAi-sense strand
aguggcuauaaauggcuccuu

SEQ ID NO: 8439 - RNA, 21 nt, RNAi-antisense strand
ggagccauuuauagccacuuu

SEQ ID NO: 8440 - DNA, 21 bp, Homo sapiens
gaagagaggatttctacactg

SEQ ID NO: 8441 - RNA, 21 nt, RNAi-sense strand
agagaggauuucuacacuguu

SEQ ID NO: 8442 - RNA, 21 nt, RNAi-antisense strand
caguguagaaauccucucuuu

SEQ ID NO: 8443 - DNA, 21 bp, Homo sapiens
gagaggatttctacactgtta

SEQ ID NO: 8444 - RNA, 21 nt, RNAi-sense strand
gaggauuucuacacuguuauu

SEQ ID NO: 8445 - RNA, 21 nt, RNAi-antisense strand
uaacaguguagaaauccucuu

SEQ ID NO: 8446 - DNA, 21 bp, Homo sapiens
gaggatttctacactgttaaa

SEQ ID NO: 8447 - RNA, 21 nt, RNAi-sense strand
ggauuucuacacuguuaaauu

SEQ ID NO: 8448 - RNA, 21 nt, RNAi-antisense strand
uuuaacaguguagaaauccuu

SEQ ID NO: 8449 - DNA, 21 bp, Homo sapiens
gaagaacctgattcctctgga

SEQ ID NO: 8450 - RNA, 21 nt, RNAi-sense strand
agaaccugauuccucuggauu

SEQ ID NO: 8451 - RNA, 21 nt, RNAi-antisense strand
uccagaggaaucagguucuuu

SEQ ID NO: 8452 - DNA, 21 bp, Homo sapiens
gaacctgattcctctggacat

SEQ ID NO: 8453 - RNA, 21 nt, RNAi-sense strand
accugauuccucuggacauuu

SEQ ID NO: 8454 - RNA, 21 nt, RNAi-antisense strand
auguccagaggaaucagguuu

SEQ ID NO: 8455 - DNA, 21 bp, Homo sapiens
gattcctctggacatgcaggt

SEQ ID NO: 8456 - RNA, 21 nt, RNAi-sense strand
uuccucuggacaugcagguuu

SEQ ID NO: 8457 - RNA, 21 nt, RNAi-antisense strand
accugcauguccagaggaauu

SEQ ID NO: 8458 - DNA, 21 bp, Homo sapiens
gacatgcaggtggaccagtca

SEQ ID NO: 8459 - RNA, 21 nt, RNAi-sense strand
caugcagguggaccagucauu

SEQ ID NO: 8460 - RNA, 21 nt, RNAi-antisense strand
ugacugguccaccugcauguu

SEQ ID NO: 8461 - DNA, 21 bp, Homo sapiens
gaccagtcagtgccagagtaa

SEQ ID NO: 8462 - RNA, 21 nt, RNAi-sense strand
ccagucagugccagaguaauu

SEQ ID NO: 8463 - RNA, 21 nt, RNAi-antisense strand
uuacucuggcacugacugguu

SEQ ID NO: 8464 - DNA, 21 bp, Homo sapiens
gagtaattaaagccttacagg

SEQ ID NO: 8465 - RNA, 21 nt, RNAi-sense strand
guaauuaaagccuuacagguu

SEQ ID NO: 8466 - RNA, 21 nt, RNAi-antisense strand
ccuguaaggcuuuaauuacuu

SEQ ID NO: 8467 - DNA, 21 bp, Homo sapiens
gatgttgatggaaggcctgaa

SEQ ID NO: 8468 - RNA, 21 nt, RNAi-sense strand
uguugauggaaggccugaauu

SEQ ID NO: 8469 - RNA, 21 nt, RNAi-antisense strand
uucaggccuuccaucaacauu

SEQ ID NO: 8470 - DNA, 21 bp, Homo sapiens
gatggaaggcctgaagcagcg

SEQ ID NO: 8471 - RNA, 21 nt, RNAi-sense strand
uggaaggccugaagcagcguu

SEQ ID NO: 8472 - RNA, 21 nt, RNAi-antisense strand
cgcugcuucaggccuuccauu

SEQ ID NO: 8473 - DNA, 21 bp, Homo sapiens
gaaggcctgaagcagcggaat

SEQ ID NO: 8474 - RNA, 21 nt, RNAi-sense strand
aggccugaagcagcggaauuu

SEQ ID NO: 8475 - RNA, 21 nt, RNAi-antisense strand
auuccgcugcuucaggccuuu

SEQ ID NO: 8476 - DNA, 21 bp, Homo sapiens
gaagcagcggaatttgcacaa

SEQ ID NO: 8477 - RNA, 21 nt, RNAi-sense strand
agcagcggaauuugcacaauu

SEQ ID NO: 8478 - RNA, 21 nt, RNAi-antisense strand
uugugcaaauuccgcugcuuu

SEQ ID NO: 8479 - DNA, 21 bp, Homo sapiens
gaatttgcacaactgtgtcaa

SEQ ID NO: 8480 - RNA, 21 nt, RNAi-sense strand
auuugcacaacugugucaauu

SEQ ID NO: 8481 - RNA, 21 nt, RNAi-antisense strand
uugacacaguugugcaaauuu

SEQ ID NO: 8482 - DNA, 21 bp, Homo sapiens
gaccatggaatggaccagact

SEQ ID NO: 8483 - RNA, 21 nt, RNAi-sense strand
ccauggaauggaccagacuuu

SEQ ID NO: 8484 - RNA, 21 nt, RNAi-antisense strand
agucugguccauuccaugguu

SEQ ID NO: 8485 - DNA, 21 bp, Homo sapiens
gaatggaccagacttattgta

SEQ ID NO: 8486 - RNA, 21 nt, RNAi-sense strand
auggaccagacuuauuguauu

SEQ ID NO: 8487 - RNA, 21 nt, RNAi-antisense strand
uacaauaagucugguccauuu

SEQ ID NO: 8488 - DNA, 21 bp, Homo sapiens
gaccagacttattgtaacaag

SEQ ID NO: 8489 - RNA, 21 nt, RNAi-sense strand
ccagacuuauuguaacaaguu

SEQ ID NO: 8490 - RNA, 21 nt, RNAi-antisense strand
cuuguuacaauaagucugguu

SEQ ID NO: 8491 - DNA, 21 bp, Homo sapiens
gacttattgtaacaagatgga

SEQ ID NO: 8492 - RNA, 21 nt, RNAi-sense strand
cuuauuguaacaagauggauu

SEQ ID NO: 8493 - RNA, 21 nt, RNAi-antisense strand
uccaucuuguuacaauaaguu

SEQ ID NO: 8494 - DNA, 21 bp, Homo sapiens
gatggaatacatgactgatta

SEQ ID NO: 8495 - RNA, 21 nt, RNAi-sense strand
uggaauacaugacugauuauu

SEQ ID NO: 8496 - RNA, 21 nt, RNAi-antisense strand
uaaucagucauguauuccauu

SEQ ID NO: 8497 - DNA, 21 bp, Homo sapiens
gagctcataatatacctcatg

SEQ ID NO: 8498 - RNA, 21 nt, RNAi-sense strand
gcucauaauauaccucauguu

SEQ ID NO: 8499 - RNA, 21 nt, RNAi-antisense strand
caugagguauauuaugagcuu

SEQ ID NO: 8500 - DNA, 21 bp, Homo sapiens
gaggaaattgttagaaacctc

SEQ ID NO: 8501 - RNA, 21 nt, RNAi-sense strand
ggaaauuguuagaaaccucuu

SEQ ID NO: 8502 - RNA, 21 nt, RNAi-antisense strand
gagguuucuaacaauuuccuu

SEQ ID NO: 8503 - DNA, 21 bp, Homo sapiens
gaaattgttagaaacctcagt

SEQ ID NO: 8504 - RNA, 21 nt, RNAi-sense strand
aauuguuagaaaccucaguuu

SEQ ID NO: 8505 - RNA, 21 nt, RNAi-antisense strand
acugagguuucuaacaauuuu

SEQ ID NO: 8506 - DNA, 21 bp, Homo sapiens
gactcctgatttgccaaagcg

SEQ ID NO: 8507 - RNA, 21 nt, RNAi-sense strand
cuccugauuugccaaagcguu

SEQ ID NO: 8508 - RNA, 21 nt, RNAi-antisense strand
cgcuuuggcaaaucaggaguu

SEQ ID NO: 8509 - DNA, 21 bp, Homo sapiens
gatttgccaaagcgactgcac

SEQ ID NO: 8510 - RNA, 21 nt, RNAi-sense strand
uuugccaaagcgacugcacuu

SEQ ID NO: 8511 - RNA, 21 nt, RNAi-antisense strand
gugcagucgcuuuggcaaauu

SEQ ID NO: 8512 - DNA, 21 bp, Homo sapiens
gactgcactatgccaagaacg

SEQ ID NO: 8513 - RNA, 21 nt, RNAi-sense strand
cugcacuaugccaagaacguu

SEQ ID NO: 8514 - RNA, 21 nt, RNAi-antisense strand
cguucuuggcauagugcaguu

SEQ ID NO: 8515 - DNA, 21 bp, Homo sapiens
gaacgtcagaatcgacaaagt

SEQ ID NO: 8516 - RNA, 21 nt, RNAi-sense strand
acgucagaaucgacaaaguuu

SEQ ID NO: 8517 - RNA, 21 nt, RNAi-antisense strand
acuuugucgauucugacguuu

SEQ ID NO: 8518 - DNA, 21 bp, Homo sapiens
gaatcgacaaagttcatctct

SEQ ID NO: 8519 - RNA, 21 nt, RNAi-sense strand
aucgacaaaguucaucucuuu

SEQ ID NO: 8520 - RNA, 21 nt, RNAi-antisense strand
agagaugaacuuugucgauuu

SEQ ID NO: 8521 - DNA, 21 bp, Homo sapiens
gacaaagttcatctctttgtg

SEQ ID NO: 8522 - RNA, 21 nt, RNAi-sense strand
caaaguucaucucuuuguguu

SEQ ID NO: 8523 - RNA, 21 nt, RNAi-antisense strand
cacaaagagaugaacuuuguu

SEQ ID NO: 8524 - DNA, 21 bp, Homo sapiens
gatcaacagtggctggctgtt

SEQ ID NO: 8525 - RNA, 21 nt, RNAi-sense strand
ucaacaguggcuggcuguuuu

SEQ ID NO: 8526 - RNA, 21 nt, RNAi-antisense strand
aacagccagccacuguugauu

SEQ ID NO: 8527 - DNA, 21 bp, Homo sapiens
gaggaggcaaccatggttata

SEQ ID NO: 8528 - RNA, 21 nt, RNAi-sense strand
ggaggcaaccaugguuauauu

SEQ ID NO: 8529 - RNA, 21 nt, RNAi-antisense strand
uauaaccaugguugccuccuu

SEQ ID NO: 8530 - DNA, 21 bp, Homo sapiens
gaggcaaccatggttataaca

SEQ ID NO: 8531 - RNA, 21 nt, RNAi-sense strand
ggcaaccaugguuauaacauu

SEQ ID NO: 8532 - RNA, 21 nt, RNAi-antisense strand
uguuauaaccaugguugccuu

SEQ ID NO: 8533 - DNA, 21 bp, Homo sapiens
gagtttaggagcatggaggct

SEQ ID NO: 8534 - RNA, 21 nt, RNAi-sense strand
guuuaggagcauggaggcuuu

SEQ ID NO: 8535 - RNA, 21 nt, RNAi-antisense strand
agccuccaugcuccuaaacuu

SEQ ID NO: 8536 - DNA, 21 bp, Homo sapiens
gagcatggaggctatctttct

SEQ ID NO: 8537 - RNA, 21 nt, RNAi-sense strand
gcauggaggcuaucuuucuuu

SEQ ID NO: 8538 - RNA, 21 nt, RNAi-antisense strand
agaaagauagccuccaugcuu

SEQ ID NO: 8539 - DNA, 21 bp, Homo sapiens
gaggctatctttctggcacat

SEQ ID NO: 8540 - RNA, 21 nt, RNAi-sense strand
ggcuaucuuucuggcacauuu

SEQ ID NO: 8541 - RNA, 21 nt, RNAi-antisense strand
augugccagaaagauagccuu

SEQ ID NO: 8542 - DNA, 21 bp, Homo sapiens
gagaagactgaagttgaacca

SEQ ID NO: 8543 - RNA, 21 nt, RNAi-sense strand
gaagacugaaguugaaccauu

SEQ ID NO: 8544 - RNA, 21 nt, RNAi-antisense strand
ugguucaacuucagucuucuu

SEQ ID NO: 8545 - DNA, 21 bp, Homo sapiens
gaagactgaagttgaaccatt

SEQ ID NO: 8546 - RNA, 21 nt, RNAi-sense strand
agacugaaguugaaccauuuu

SEQ ID NO: 8547 - RNA, 21 nt, RNAi-antisense strand
aaugguucaacuucagucuuu

SEQ ID NO: 8548 - DNA, 21 bp, Homo sapiens
gactgaagttgaaccatttga

SEQ ID NO: 8549 - RNA, 21 nt, RNAi-sense strand
cugaaguugaaccauuugauu

SEQ ID NO: 8550 - RNA, 21 nt, RNAi-antisense strand
ucaaaugguucaacuucaguu

SEQ ID NO: 8551 - DNA, 21 bp, Homo sapiens
gaagtctataacctaatgtgt

SEQ ID NO: 8552 - RNA, 21 nt, RNAi-sense strand
agucuauaaccuaauguguuu

SEQ ID NO: 8553 - RNA, 21 nt, RNAi-antisense strand
acacauuagguuauagacuuu

SEQ ID NO: 8554 - DNA, 21 bp, Homo sapiens
gatcttctacgcattcaacca

SEQ ID NO: 8555 - RNA, 21 nt, RNAi-sense strand
ucuucuacgcauucaaccauu

SEQ ID NO: 8556 - RNA, 21 nt, RNAi-antisense strand
ugguugaaugcguagaagauu

SEQ ID NO: 8557 - DNA, 21 bp, Homo sapiens
gagtctcttgactgtttctgc

SEQ ID NO: 8558 - RNA, 21 nt, RNAi-sense strand
gucucuugacuguuucugcuu

SEQ ID NO: 8559 - RNA, 21 nt, RNAi-antisense strand
gcagaaacagucaagagacuu

SEQ ID NO: 8560 - DNA, 21 bp, Homo sapiens
gaacaagtgaatcagatgcta

SEQ ID NO: 8561 - RNA, 21 nt, RNAi-sense strand
acaagugaaucagaugcuauu

SEQ ID NO: 8562 - RNA, 21 nt, RNAi-antisense strand
uagcaucugauucacuuguuu

SEQ ID NO: 8563 - DNA, 21 bp, Homo sapiens
gaatcagatgctaaatctcac

SEQ ID NO: 8564 - RNA, 21 nt, RNAi-sense strand
aucagaugcuaaaucucacuu

SEQ ID NO: 8565 - RNA, 21 nt, RNAi-antisense strand
gugagauuuagcaucugauuu

SEQ ID NO: 8566 - DNA, 21 bp, Homo sapiens
gaagaaataacagcaacagtg

SEQ ID NO: 8567 - RNA, 21 nt, RNAi-sense strand
agaaauaacagcaacaguguu

SEQ ID NO: 8568 - RNA, 21 nt, RNAi-antisense strand
cacuguugcuguuauuucuuu

SEQ ID NO: 8569 - DNA, 21 bp, Homo sapiens
gaaataacagcaacagtgaaa

SEQ ID NO: 8570 - RNA, 21 nt, RNAi-sense strand
aauaacagcaacagugaaauu

SEQ ID NO: 8571 - RNA, 21 nt, RNAi-antisense strand
uuucacuguugcuguuauuuu

SEQ ID NO: 8572 - DNA, 21 bp, Homo sapiens
gaaagtaaatttgccatttgg

SEQ ID NO: 8573 - RNA, 21 nt, RNAi-sense strand
aaguaaauuugccauuugguu

SEQ ID NO: 8574 - RNA, 21 nt, RNAi-antisense strand
ccaaauggcaaauuuacuuuu

SEQ ID NO: 8575 - DNA, 21 bp, Homo sapiens
gaagaacgtggaccactgtct

SEQ ID NO: 8576 - RNA, 21 nt, RNAi-sense strand
agaacguggaccacugucuuu

SEQ ID NO: 8577 - RNA, 21 nt, RNAi-antisense strand
agacagugguccacguucuuu

SEQ ID NO: 8578 - DNA, 21 bp, Homo sapiens
gaacgtggaccactgtctcct

SEQ ID NO: 8579 - RNA, 21 nt, RNAi-sense strand
acguggaccacugucuccuuu

SEQ ID NO: 8580 - RNA, 21 nt, RNAi-antisense strand
aggagacagugguccacguuu

SEQ ID NO: 8581 - DNA, 21 bp, Homo sapiens
gaccactgtctcctttaccac

SEQ ID NO: 8582 - RNA, 21 nt, RNAi-sense strand
ccacugucuccuuuaccacuu

SEQ ID NO: 8583 - RNA, 21 nt, RNAi-antisense strand
gugguaaaggagacagugguu

SEQ ID NO: 8584 - DNA, 21 bp, Homo sapiens
gaatatgtcagtggatttgga

SEQ ID NO: 8585 - RNA, 21 nt, RNAi-sense strand
auaugucaguggauuuggauu

SEQ ID NO: 8586 - RNA, 21 nt, RNAi-antisense strand
uccaaauccacugacauauuu

SEQ ID NO: 8587 - DNA, 21 bp, Homo sapiens
gagacacatcgcctctgcctc

SEQ ID NO: 8588 - RNA, 21 nt, RNAi-sense strand
gacacaucgccucugccucuu

SEQ ID NO: 8589 - RNA, 21 nt, RNAi-antisense strand
gaggcagaggcgaugugucuu

SEQ ID NO: 8590 - DNA, 21 bp, Homo sapiens
gaacatcagatagccaatatg

SEQ ID NO: 8591 - RNA, 21 nt, RNAi-sense strand
acaucagauagccaauauguu

SEQ ID NO: 8592 - RNA, 21 nt, RNAi-antisense strand
cauauuggcuaucugauguuu

SEQ ID NO: 8593 - DNA, 21 bp, Homo sapiens
gatagccaatatgatgcttta

SEQ ID NO: 8594 - RNA, 21 nt, RNAi-sense strand
uagccaauaugaugcuuuauu

SEQ ID NO: 8595 - RNA, 21 nt, RNAi-antisense strand
uaaagcaucauauuggcuauu

SEQ ID NO: 8596 - DNA, 21 bp, Homo sapiens
gactacttccacagtgttctt

SEQ ID NO: 8597 - RNA, 21 nt, RNAi-sense strand
cuacuuccacaguguucuuuu

SEQ ID NO: 8598 - RNA, 21 nt, RNAi-antisense strand
aagaacacuguggaaguaguu

SEQ ID NO: 8599 - DNA, 21 bp, Homo sapiens
gaaagaaatggagtaaatgtg

SEQ ID NO: 8600 - RNA, 21 nt, RNAi-sense strand
aagaaauggaguaaauguguu

SEQ ID NO: 8601 - RNA, 21 nt, RNAi-antisense strand
cacauuuacuccauuucuuuu

SEQ ID NO: 8602 - DNA, 21 bp, Homo sapiens
gaaatggagtaaatgtggtta

SEQ ID NO: 8603 - RNA, 21 nt, RNAi-sense strand
aauggaguaaaugugguuauu

SEQ ID NO: 8604 - RNA, 21 nt, RNAi-antisense strand
uaaccacauuuacuccauuuu

SEQ ID NO: 8605 - DNA, 21 bp, Homo sapiens
gagtaaatgtggttagtggac

SEQ ID NO: 8606 - RNA, 21 nt, RNAi-sense strand
guaaaugugguuaguggacuu

SEQ ID NO: 8607 - RNA, 21 nt, RNAi-antisense strand
guccacuaaccacauuuacuu

SEQ ID NO: 8608 - DNA, 21 bp, Homo sapiens
gatgctccagatgaaattacc

SEQ ID NO: 8609 - RNA, 21 nt, RNAi-sense strand
ugcuccagaugaaauuaccuu

SEQ ID NO: 8610 - RNA, 21 nt, RNAi-antisense strand
gguaauuucaucuggagcauu

SEQ ID NO: 8611 - DNA, 21 bp, Homo sapiens
gaaattaccaaacatttagcc

SEQ ID NO: 8612 - RNA, 21 nt, RNAi-sense strand
aauuaccaaacauuuagccuu

SEQ ID NO: 8613 - RNA, 21 nt, RNAi-antisense strand
ggcuaaauguuugguaauuuu

SEQ ID NO: 8614 - DNA, 21 bp, Homo sapiens
gacctaccaacgtggagagct

SEQ ID NO: 8615 - RNA, 21 nt, RNAi-sense strand
ccuaccaacguggagagcuuu

SEQ ID NO: 8616 - RNA, 21 nt, RNAi-antisense strand
agcucuccacguugguagguu

SEQ ID NO: 8617 - DNA, 21 bp, Homo sapiens
gagagctgtcctgaaggtaaa

SEQ ID NO: 8618 - RNA, 21 nt, RNAi-sense strand
gagcuguccugaagguaaauu

SEQ ID NO: 8619 - RNA, 21 nt, RNAi-antisense strand
uuuaccuucaggacagcucuu

SEQ ID NO: 8620 - DNA, 21 bp, Homo sapiens
gagctgtcctgaaggtaaacc

SEQ ID NO: 8621 - RNA, 21 nt, RNAi-sense strand
gcuguccugaagguaaaccuu

SEQ ID NO: 8622 - RNA, 21 nt, RNAi-antisense strand
gguuuaccuucaggacagcuu

SEQ ID NO: 8623 - DNA, 21 bp, Homo sapiens
gaaggtaaaccagaagctctt

SEQ ID NO: 8624 - RNA, 21 nt, RNAi-sense strand
agguaaaccagaagcucuuuu

SEQ ID NO: 8625 - RNA, 21 nt, RNAi-antisense strand
aagagcuucugguuuaccuuu

SEQ ID NO: 8626 - DNA, 21 bp, Homo sapiens
gaagaaagatttacagctcac

SEQ ID NO: 8627 - RNA, 21 nt, RNAi-sense strand
agaaagauuuacagcucacuu

SEQ ID NO: 8628 - RNA, 21 nt, RNAi-antisense strand
gugagcuguaaaucuuucuuu

SEQ ID NO: 8629 - DNA, 21 bp, Homo sapiens
gaaagatttacagctcacatt

SEQ ID NO: 8630 - RNA, 21 nt, RNAi-sense strand
aagauuuacagcucacauuuu

SEQ ID NO: 8631 - RNA, 21 nt, RNAi-antisense strand
aaugugagcuguaaaucuuuu

SEQ ID NO: 8632 - DNA, 21 bp, Homo sapiens
gacttctatcaggataaagtg

SEQ ID NO: 8633 - RNA, 21 nt, RNAi-sense strand
cuucuaucaggauaaaguguu

SEQ ID NO: 8634 - RNA, 21 nt, RNAi-antisense strand
cacuuuauccugauagaaguu

SEQ ID NO: 8635 - DNA, 21 bp, Homo sapiens
gataaagtgcagcctgtctct

SEQ ID NO: 8636 - RNA, 21 nt, RNAi-sense strand
uaaagugcagccugucucuuu

SEQ ID NO: 8637 - RNA, 21 nt, RNAi-antisense strand
agagacaggcugcacuuuauu

SEQ ID NO: 8638 - DNA, 21 bp, Homo sapiens
tatgcagctaccaggacaatg

SEQ ID NO: 8639 - RNA, 21 nt, RNAi-sense strand
ugcagcuaccaggacaauguu

SEQ ID NO: 8640 - RNA, 21 nt, RNAi-antisense strand
cauuguccugguagcugcauu

SEQ ID NO: 8641 - DNA, 21 bp, Homo sapiens
taccaggacaatggaatctac

SEQ ID NO: 8642 - RNA, 21 nt, RNAi-sense strand
ccaggacaauggaaucuacuu

SEQ ID NO: 8643 - RNA, 21 nt, RNAi-antisense strand
guagauuccauuguccugguu

SEQ ID NO: 8644 - DNA, 21 bp, Homo sapiens
tacgttgactttagcaacgga

SEQ ID NO: 8645 - RNA, 21 nt, RNAi-sense strand
cguugacuuuagcaacggauu

SEQ ID NO: 8646 - RNA, 21 nt, RNAi-antisense strand
uccguugcuaaagucaacguu

SEQ ID NO: 8647 - DNA, 21 bp, Homo sapiens
tagcaacggaacaacctgtta

SEQ ID NO: 8648 - RNA, 21 nt, RNAi-sense strand
gcaacggaacaaccuguuauu

SEQ ID NO: 8649 - RNA, 21 nt, RNAi-antisense strand
uaacagguuguuccguugcuu

SEQ ID NO: 8650 - DNA, 21 bp, Homo sapiens
tagcttgcattgttcttcttg

SEQ ID NO: 8651 - RNA, 21 nt, RNAi-sense strand
gcuugcauuguucuucuuguu

SEQ ID NO: 8652 - RNA, 21 nt, RNAi-antisense strand
caagaagaacaaugcaagcuu

SEQ ID NO: 8653 - DNA, 21 bp, Homo sapiens
tagaggactggagaactgccg

SEQ ID NO: 8654 - RNA, 21 nt, RNAi-sense strand
gaggacuggagaacugccguu

SEQ ID NO: 8655 - RNA, 21 nt, RNAi-antisense strand
cggcaguucuccaguccucuu

SEQ ID NO: 8656 - DNA, 21 bp, Homo sapiens
taaagaccgaggtgattgctg

SEQ ID NO: 8657 - RNA, 21 nt, RNAi-sense strand
aagaccgaggugauugcuguu

SEQ ID NO: 8658 - RNA, 21 nt, RNAi-antisense strand
cagcaaucaccucggucuuuu

SEQ ID NO: 8659 - DNA, 21 bp, Homo sapiens
taaatttcgttgtggagagac

SEQ ID NO: 8660 - RNA, 21 nt, RNAi-sense strand
aauuucguuguggagagacuu

SEQ ID NO: 8661 - RNA, 21 nt, RNAi-antisense strand
gucucuccacaacgaaauuuu

SEQ ID NO: 8662 - DNA, 21 bp, Homo sapiens
tagaggccagcctttgctctt

SEQ ID NO: 8663 - RNA, 21 nt, RNAi-sense strand
gaggccagccuuugcucuuuu

SEQ ID NO: 8664 - RNA, 21 nt, RNAi-antisense strand
aagagcaaaggcuggccucuu

SEQ ID NO: 8665 - DNA, 21 bp, Homo sapiens
tataagagtgtttgccaagga

SEQ ID NO: 8666 - RNA, 21 nt, RNAi-sense strand
uaagaguguuugccaaggauu

SEQ ID NO: 8667 - RNA, 21 nt, RNAi-antisense strand
uccuuggcaaacacucuuauu

SEQ ID NO: 8668 - DNA, 21 bp, Homo sapiens
taagagtgtttgccaaggaga

SEQ ID NO: 8669 - RNA, 21 nt, RNAi-sense strand
agaguguuugccaaggagauu

SEQ ID NO: 8670 - RNA, 21 nt, RNAi-antisense strand
ucuccuuggcaaacacucuuu

SEQ ID NO: 8671 - DNA, 21 bp, Homo sapiens
tatggatggatttagagctga

SEQ ID NO: 8672 - RNA, 21 nt, RNAi-sense strand
uggauggauuuagagcugauu

SEQ ID NO: 8673 - RNA, 21 nt, RNAi-antisense strand
ucagcucuaaauccauccauu

SEQ ID NO: 8674 - DNA, 21 bp, Homo sapiens
tacatgagagctatgtatcct

SEQ ID NO: 8675 - RNA, 21 nt, RNAi-sense strand
caugagagcuauguauccuuu

SEQ ID NO: 8676 - RNA, 21 nt, RNAi-antisense strand
aggauacauagcucucauguu

SEQ ID NO: 8677 - DNA, 21 bp, Homo sapiens
tatccagagtcacatggcatc

SEQ ID NO: 8678 - RNA, 21 nt, RNAi-sense strand
uccagagucacauggcaucuu

SEQ ID NO: 8679 - RNA, 21 nt, RNAi-antisense strand
gaugccaugugacucuggauu

SEQ ID NO: 8680 - DNA, 21 bp, Homo sapiens
taatccagcctggtggcatgg

SEQ ID NO: 8681 - RNA, 21 nt, RNAi-sense strand
auccagccugguggcaugguu

SEQ ID NO: 8682 - RNA, 21 nt, RNAi-antisense strand
ccaugccaccaggcuggauuu

SEQ ID NO: 8683 - DNA, 21 bp, Homo sapiens
tataaatggctcctttccttc

SEQ ID NO: 8684 - RNA, 21 nt, RNAi-sense strand
uaaauggcuccuuuccuucuu

SEQ ID NO: 8685 - RNA, 21 nt, RNAi-antisense strand
gaaggaaaggagccauuuauu

SEQ ID NO: 8686 - DNA, 21 bp, Homo sapiens
taaatggctcctttccttcca

SEQ ID NO: 8687 - RNA, 21 nt, RNAi-sense strand
aauggcuccuuuccuuccauu

SEQ ID NO: 8688 - RNA, 21 nt, RNAi-antisense strand
uggaaggaaaggagccauuuu

SEQ ID NO: 8689 - DNA, 21 bp, Homo sapiens
tatacatgccttacaacggaa

SEQ ID NO: 8690 - RNA, 21 nt, RNAi-sense strand
uacaugccuuacaacggaauu

SEQ ID NO: 8691 - RNA, 21 nt, RNAi-antisense strand
uuccguuguaaggcauguauu

SEQ ID NO: 8692 - DNA, 21 bp, Homo sapiens
tacatgccttacaacggaagt

SEQ ID NO: 8693 - RNA, 21 nt, RNAi-sense strand
caugccuuacaacggaaguuu

SEQ ID NO: 8694 - RNA, 21 nt, RNAi-antisense strand
acuuccguuguaaggcauguu

SEQ ID NO: 8695 - DNA, 21 bp, Homo sapiens
taattaaagccttacaggtag

SEQ ID NO: 8696 - RNA, 21 nt, RNAi-sense strand
auuaaagccuuacagguaguu

SEQ ID NO: 8697 - RNA, 21 nt, RNAi-antisense strand
cuaccuguaaggcuuuaauuu

SEQ ID NO: 8698 - DNA, 21 bp, Homo sapiens
taaagccttacaggtagtaga

SEQ ID NO: 8699 - RNA, 21 nt, RNAi-sense strand
aagccuuacagguaguagauu

SEQ ID NO: 8700 - RNA, 21 nt, RNAi-antisense strand
ucuacuaccuguaaggcuuuu

SEQ ID NO: 8701 - DNA, 21 bp, Homo sapiens
tacaggtagtagatcatgctt

SEQ ID NO: 8702 - RNA, 21 nt, RNAi-sense strand
cagguaguagaucaugcuuuu

SEQ ID NO: 8703 - RNA, 21 nt, RNAi-antisense strand
aagcaugaucuacuaccuguu

SEQ ID NO: 8704 - DNA, 21 bp, Homo sapiens
tatcatccttctggctgacca

SEQ ID NO: 8705 - RNA, 21 nt, RNAi-sense strand
ucauccuucuggcugaccauu

SEQ ID NO: 8706 - RNA, 21 nt, RNAi-antisense strand
uggucagccagaaggaugauu

SEQ ID NO: 8707 - DNA, 21 bp, Homo sapiens
taacaagatggaatacatgac

SEQ ID NO: 8708 - RNA, 21 nt, RNAi-sense strand
acaagauggaauacaugacuu

SEQ ID NO: 8709 - RNA, 21 nt, RNAi-antisense strand
gucauguauuccaucuuguuu

SEQ ID NO: 8710 - DNA, 21 bp, Homo sapiens
taaacttcttctacatgtacg

SEQ ID NO: 8711 - RNA, 21 nt, RNAi-sense strand
aacuucuucuacauguacguu

SEQ ID NO: 8712 - RNA, 21 nt, RNAi-antisense strand
cguacauguagaagaaguuuu

SEQ ID NO: 8713 - DNA, 21 bp, Homo sapiens
tagaaacctcagttgccgaaa

SEQ ID NO: 8714 - RNA, 21 nt, RNAi-sense strand
gaaaccucaguugccgaaauu

SEQ ID NO: 8715 - RNA, 21 nt, RNAi-antisense strand
uuucggcaacugagguuucuu

SEQ ID NO: 8716 - DNA, 21 bp, Homo sapiens
tatttgactcctgatttgcca

SEQ ID NO: 8717 - RNA, 21 nt, RNAi-sense strand
uuugacuccugauuugccauu

SEQ ID NO: 8718 - RNA, 21 nt, RNAi-antisense strand
uggcaaaucaggagucaaauu

SEQ ID NO: 8719 - DNA, 21 bp, Homo sapiens
tatgccaagaacgtcagaatc

SEQ ID NO: 8720 - RNA, 21 nt, RNAi-sense strand
ugccaagaacgucagaaucuu

SEQ ID NO: 8721 - RNA, 21 nt, RNAi-antisense strand
gauucugacguucuuggcauu

SEQ ID NO: 8722 - DNA, 21 bp, Homo sapiens
tacaaattgtggaggaggcaa

SEQ ID NO: 8723 - RNA, 21 nt, RNAi-sense strand
caaauuguggaggaggcaauu

SEQ ID NO: 8724 - RNA, 21 nt, RNAi-antisense strand
uugccuccuccacaauuuguu

SEQ ID NO: 8725 - DNA, 21 bp, Homo sapiens
tataacaatgagtttaggagc

SEQ ID NO: 8726 - RNA, 21 nt, RNAi-sense strand
uaacaaugaguuuaggagcuu

SEQ ID NO: 8727 - RNA, 21 nt, RNAi-antisense strand
gcuccuaaacucauuguuauu

SEQ ID NO: 8728 - DNA, 21 bp, Homo sapiens
taacaatgagtttaggagcat

SEQ ID NO: 8729 - RNA, 21 nt, RNAi-sense strand
acaaugaguuuaggagcauuu

SEQ ID NO: 8730 - RNA, 21 nt, RNAi-antisense strand
augcuccuaaacucauuguuu

SEQ ID NO: 8731 - DNA, 21 bp, Homo sapiens
taggagcatggaggctatctt

SEQ ID NO: 8732 - RNA, 21 nt, RNAi-sense strand
ggagcauggaggcuaucuuuu

SEQ ID NO: 8733 - RNA, 21 nt, RNAi-antisense strand
aagauagccuccaugcuccuu

SEQ ID NO: 8734 - DNA, 21 bp, Homo sapiens
tatctttctggcacatggacc

SEQ ID NO: 8735 - RNA, 21 nt, RNAi-sense strand
ucuuucuggcacauggaccuu

SEQ ID NO: 8736 - RNA, 21 nt, RNAi-antisense strand
gguccaugugccagaaagauu

SEQ ID NO: 8737 - DNA, 21 bp, Homo sapiens
taaagagaagactgaagttga

SEQ ID NO: 8738 - RNA, 21 nt, RNAi-sense strand
aagagaagacugaaguugauu

SEQ ID NO: 8739 - RNA, 21 nt, RNAi-antisense strand
ucaacuucagucuucucuuuu

SEQ ID NO: 8740 - DNA, 21 bp, Homo sapiens
taacctaatgtgtgatcttct

SEQ ID NO: 8741 - RNA, 21 nt, RNAi-sense strand
accuaaugugugaucuucuuu

SEQ ID NO: 8742 - RNA, 21 nt, RNAi-antisense strand
agaagaucacacauuagguuu

SEQ ID NO: 8743 - DNA, 21 bp, Homo sapiens
taatgtgtgatcttctacgca

SEQ ID NO: 8744 - RNA, 21 nt, RNAi-sense strand
augugugaucuucuacgcauu

SEQ ID NO: 8745 - RNA, 21 nt, RNAi-antisense strand
ugcguagaagaucacacauuu

SEQ ID NO: 8746 - DNA, 21 bp, Homo sapiens
tacgcattcaaccagcaccaa

SEQ ID NO: 8747 - RNA, 21 nt, RNAi-sense strand
cgcauucaaccagcaccaauu

SEQ ID NO: 8748 - RNA, 21 nt, RNAi-antisense strand
uuggugcugguugaaugcguu

SEQ ID NO: 8749 - DNA, 21 bp, Homo sapiens
taaaccatcttctgaaggtgc

SEQ ID NO: 8750 - RNA, 21 nt, RNAi-sense strand
aaccaucuucugaaggugcuu

SEQ ID NO: 8751 - RNA, 21 nt, RNAi-antisense strand
gcaccuucagaagaugguuuu

SEQ ID NO: 8752 - DNA, 21 bp, Homo sapiens
tagtactcagctggaacaagt

SEQ ID NO: 8753 - RNA, 21 nt, RNAi-sense strand
guacucagcuggaacaaguuu

SEQ ID NO: 8754 - RNA, 21 nt, RNAi-antisense strand
acuuguuccagcugaguacuu

SEQ ID NO: 8755 - DNA, 21 bp, Homo sapiens
tactcagctggaacaagtgaa

SEQ ID NO: 8756 - RNA, 21 nt, RNAi-sense strand
cucagcuggaacaagugaauu

SEQ ID NO: 8757 - RNA, 21 nt, RNAi-antisense strand
uucacuuguuccagcugaguu

SEQ ID NO: 8758 - DNA, 21 bp, Homo sapiens
taacagcaacagtgaaagtaa

SEQ ID NO: 8759 - RNA, 21 nt, RNAi-sense strand
acagcaacagugaaaguaauu

SEQ ID NO: 8760 - RNA, 21 nt, RNAi-antisense strand
uuacuuucacuguugcuguuu

SEQ ID NO: 8761 - DNA, 21 bp, Homo sapiens
tactgcagaagaacgtggacc

SEQ ID NO: 8762 - RNA, 21 nt, RNAi-sense strand
cugcagaagaacguggaccuu

SEQ ID NO: 8763 - RNA, 21 nt, RNAi-antisense strand
gguccacguucuucugcaguu

SEQ ID NO: 8764 - DNA, 21 bp, Homo sapiens
tatcctcctgccagcaataga

SEQ ID NO: 8765 - RNA, 21 nt, RNAi-sense strand
uccuccugccagcaauagauu

SEQ ID NO: 8766 - RNA, 21 nt, RNAi-antisense strand
ucuauugcuggcaggaggauu

SEQ ID NO: 8767 - DNA, 21 bp, Homo sapiens
tagaacatcagatagccaata

SEQ ID NO: 8768 - RNA, 21 nt, RNAi-sense strand
gaacaucagauagccaauauu

SEQ ID NO: 8769 - RNA, 21 nt, RNAi-antisense strand
uauuggcuaucugauguucuu

SEQ ID NO: 8770 - DNA, 21 bp, Homo sapiens
tactagcaatttggtacctat

SEQ ID NO: 8771 - RNA, 21 nt, RNAi-sense strand
cuagcaauuugguaccuauuu

SEQ ID NO: 8772 - RNA, 21 nt, RNAi-antisense strand
auagguaccaaauugcuaguu

SEQ ID NO: 8773 - DNA, 21 bp, Homo sapiens
tagcaatttggtacctatgta

SEQ ID NO: 8774 - RNA, 21 nt, RNAi-sense strand
gcaauuugguaccuauguauu

SEQ ID NO: 8775 - RNA, 21 nt, RNAi-antisense strand
uacauagguaccaaauugcuu

SEQ ID NO: 8776 - DNA, 21 bp, Homo sapiens
tacttccacagtgttcttctt

SEQ ID NO: 8777 - RNA, 21 nt, RNAi-sense strand
cuuccacaguguucuucuuuu

SEQ ID NO: 8778 - RNA, 21 nt, RNAi-antisense strand
aagaagaacacuguggaaguu

SEQ ID NO: 8779 - DNA, 21 bp, Homo sapiens
taaatgtggttagtggaccaa

SEQ ID NO: 8780 - RNA, 21 nt, RNAi-sense strand
aaugugguuaguggaccaauu

SEQ ID NO: 8781 - RNA, 21 nt, RNAi-antisense strand
uugguccacuaaccacauuuu

SEQ ID NO: 8782 - DNA, 21 bp, Homo sapiens
taccaaacatttagccaacac

SEQ ID NO: 8783 - RNA, 21 nt, RNAi-sense strand
ccaaacauuuagccaacacuu

SEQ ID NO: 8784 - RNA, 21 nt, RNAi-antisense strand
guguuggcuaaauguuugguu

SEQ ID NO: 8785 - DNA, 21 bp, Homo sapiens
tactttgtggtgctgaccagt

SEQ ID NO: 8786 - RNA, 21 nt, RNAi-sense strand
cuuuguggugcugaccaguuu

SEQ ID NO: 8787 - RNA, 21 nt, RNAi-antisense strand
acuggucagcaccacaaaguu

SEQ ID NO: 8788 - DNA, 21 bp, Homo sapiens
taccaacgtggagagctgtcc

SEQ ID NO: 8789 - RNA, 21 nt, RNAi-sense strand
ccaacguggagagcuguccuu

SEQ ID NO: 8790 - RNA, 21 nt, RNAi-antisense strand
ggacagcucuccacguugguu

SEQ ID NO: 8791 - DNA, 21 bp, Homo sapiens
tatcaggataaagtgcagcct

SEQ ID NO: 8792 - RNA, 21 nt, RNAi-sense strand
ucaggauaaagugcagccuuu

SEQ ID NO: 8793 - RNA, 21 nt, RNAi-antisense strand
aggcugcacuuuauccugauu

SEQ ID NO: 8794 - DNA, 21 bp, Homo sapiens
taaagtgcagcctgtctctga

SEQ ID NO: 8795 - RNA, 21 nt, RNAi-sense strand
aagugcagccugucucugauu

SEQ ID NO: 8796 - RNA, 21 nt, RNAi-antisense strand
ucagagacaggcugcacuuuu

SEQ ID NO: 8797 - DNA, 21 bp, Homo sapiens
taccaacatttgaaaccacta

SEQ ID NO: 8798 - RNA, 21 nt, RNAi-sense strand
ccaacauuugaaaccacuauu

SEQ ID NO: 8799 - RNA, 21 nt, RNAi-antisense strand
uagugguuucaaauguugguu

SEQ ID NO: 8800 - DNA, 21 bp, Homo sapiens
aatcaactcgaatatggatgt

SEQ ID NO: 8801 - RNA, 21 nt, RNAi-sense strand
ucaacucgaauauggauguuu

SEQ ID NO: 8802 - RNA, 21 nt, RNAi-antisense strand
acauccauauucgaguugauu

SEQ ID NO: 8803 - DNA, 21 bp, Homo sapiens
aactcgaatatggatgtgcaa

SEQ ID NO: 8804 - RNA, 21 nt, RNAi-sense strand
cucgaauauggaugugcaauu

SEQ ID NO: 8805 - RNA, 21 nt, RNAi-antisense strand
uugcacauccauauucgaguu

SEQ ID NO: 8806 - DNA, 21 bp, Homo sapiens
aataaatttcgttgtggagag

SEQ ID NO: 8807 - RNA, 21 nt, RNAi-sense strand
uaaauuucguuguggagaguu

SEQ ID NO: 8808 - RNA, 21 nt, RNAi-antisense strand
cucuccacaacgaaauuuauu

SEQ ID NO: 8809 - DNA, 21 bp, Homo sapiens
aagaaagattgctgtgctgac

SEQ ID NO: 8810 - RNA, 21 nt, RNAi-sense strand
gaaagauugcugugcugacuu

SEQ ID NO: 8811 - RNA, 21 nt, RNAi-antisense strand
gucagcacagcaaucuuucuu

SEQ ID NO: 8812 - DNA, 21 bp, Homo sapiens
aagtggctataaatggctcct

SEQ ID NO: 8813 - RNA, 21 nt, RNAi-sense strand
guggcuauaaauggcuccuuu

SEQ ID NO: 8814 - RNA, 21 nt, RNAi-antisense strand
aggagccauuuauagccacuu

SEQ ID NO: 8815 - DNA, 21 bp, Homo sapiens
aagagaggatttctacactgt

SEQ ID NO: 8816 - RNA, 21 nt, RNAi-sense strand
gagaggauuucuacacuguuu

SEQ ID NO: 8817 - RNA, 21 nt, RNAi-antisense strand
acaguguagaaauccucucuu

SEQ ID NO: 8818 - DNA, 21 bp, Homo sapiens
aagcagcggaatttgcacaac

SEQ ID NO: 8819 - RNA, 21 nt, RNAi-sense strand
gcagcggaauuugcacaacuu

SEQ ID NO: 8820 - RNA, 21 nt, RNAi-antisense strand
guugugcaaauuccgcugcuu

SEQ ID NO: 8821 - DNA, 21 bp, Homo sapiens
aatggaccagacttattgtaa

SEQ ID NO: 8822 - RNA, 21 nt, RNAi-sense strand
uggaccagacuuauuguaauu

SEQ ID NO: 8823 - RNA, 21 nt, RNAi-antisense strand
uuacaauaagucugguccauu

SEQ ID NO: 8824 - DNA, 21 bp, Homo sapiens
aagatggaatacatgactgat

SEQ ID NO: 8825 - RNA, 21 nt, RNAi-sense strand
gauggaauacaugacugauuu

SEQ ID NO: 8826 - RNA, 21 nt, RNAi-antisense strand
aucagucauguauuccaucuu

SEQ ID NO: 8827 - DNA, 21 bp, Homo sapiens
aacttcttctacatgtacgaa

SEQ ID NO: 8828 - RNA, 21 nt, RNAi-sense strand
cuucuucuacauguacgaauu

SEQ ID NO: 8829 - RNA, 21 nt, RNAi-antisense strand
uucguacauguagaagaaguu

SEQ ID NO: 8830 - DNA, 21 bp, Homo sapiens
aattgttagaaacctcagttg

SEQ ID NO: 8831 - RNA, 21 nt, RNAi-sense strand
uuguuagaaaccucaguuguu

SEQ ID NO: 8832 - RNA, 21 nt, RNAi-antisense strand
caacugagguuucuaacaauu

SEQ ID NO: 8833 - DNA, 21 bp, Homo sapiens
aaacctgatcagcatttcaag

SEQ ID NO: 8834 - RNA, 21 nt, RNAi-sense strand
accugaucagcauuucaaguu

SEQ ID NO: 8835 - RNA, 21 nt, RNAi-antisense strand
cuugaaaugcugaucagguuu

SEQ ID NO: 8836 - DNA, 21 bp, Homo sapiens
aagaacgtcagaatcgacaaa

SEQ ID NO: 8837 - RNA, 21 nt, RNAi-sense strand
gaacgucagaaucgacaaauu

SEQ ID NO: 8838 - RNA, 21 nt, RNAi-antisense strand
uuugucgauucugacguucuu

SEQ ID NO: 8839 - DNA, 21 bp, Homo sapiens
aacgtcagaatcgacaaagtt

SEQ ID NO: 8840 - RNA, 21 nt, RNAi-sense strand
cgucagaaucgacaaaguuuu

SEQ ID NO: 8841 - RNA, 21 nt, RNAi-antisense strand
aacuuugucgauucugacguu

SEQ ID NO: 8842 - DNA, 21 bp, Homo sapiens
aaagttcatctctttgtggat

SEQ ID NO: 8843 - RNA, 21 nt, RNAi-sense strand
aguucaucucuuuguggauuu

SEQ ID NO: 8844 - RNA, 21 nt, RNAi-antisense strand
auccacaaagagaugaacuuu

SEQ ID NO: 8845 - DNA, 21 bp, Homo sapiens
aagttcatctctttgtggatc

SEQ ID NO: 8846 - RNA, 21 nt, RNAi-sense strand
guucaucucuuuguggaucuu

SEQ ID NO: 8847 - RNA, 21 nt, RNAi-antisense strand
gauccacaaagagaugaacuu

SEQ ID NO: 8848 - DNA, 21 bp, Homo sapiens
aatacaaattgtggaggaggc

SEQ ID NO: 8849 - RNA, 21 nt, RNAi-sense strand
uacaaauuguggaggaggcuu

SEQ ID NO: 8850 - RNA, 21 nt, RNAi-antisense strand
gccuccuccacaauuuguauu

SEQ ID NO: 8851 - DNA, 21 bp, Homo sapiens
aaccatggttataacaatgag

SEQ ID NO: 8852 - RNA, 21 nt, RNAi-sense strand
ccaugguuauaacaaugaguu

SEQ ID NO: 8853 - RNA, 21 nt, RNAi-antisense strand
cucauuguuauaaccaugguu

SEQ ID NO: 8854 - DNA, 21 bp, Homo sapiens
aatgagtttaggagcatggag

SEQ ID NO: 8855 - RNA, 21 nt, RNAi-sense strand
ugaguuuaggagcauggaguu

SEQ ID NO: 8856 - RNA, 21 nt, RNAi-antisense strand
cuccaugcuccuaaacucauu

SEQ ID NO: 8857 - DNA, 21 bp, Homo sapiens
aagtctataacctaatgtgtg

SEQ ID NO: 8858 - RNA, 21 nt, RNAi-sense strand
gucuauaaccuaauguguguu

SEQ ID NO: 8859 - RNA, 21 nt, RNAi-antisense strand
cacacauuagguuauagacuu

SEQ ID NO: 8860 - DNA, 21 bp, Homo sapiens
aaatagtactcagctggaaca

SEQ ID NO: 8861 - RNA, 21 nt, RNAi-sense strand
auaguacucagcuggaacauu

SEQ ID NO: 8862 - RNA, 21 nt, RNAi-antisense strand
uguuccagcugaguacuauuu

SEQ ID NO: 8863 - DNA, 21 bp, Homo sapiens
aatagtactcagctggaacaa

SEQ ID NO: 8864 - RNA, 21 nt, RNAi-sense strand
uaguacucagcuggaacaauu

SEQ ID NO: 8865 - RNA, 21 nt, RNAi-antisense strand
uuguuccagcugaguacuauu

SEQ ID NO: 8866 - DNA, 21 bp, Homo sapiens
aagtgaatcagatgctaaatc

SEQ ID NO: 8867 - RNA, 21 nt, RNAi-sense strand
gugaaucagaugcuaaaucuu

SEQ ID NO: 8868 - RNA, 21 nt, RNAi-antisense strand
gauuuagcaucugauucacuu

SEQ ID NO: 8869 - DNA, 21 bp, Homo sapiens
aatcagatgctaaatctcacc

SEQ ID NO: 8870 - RNA, 21 nt, RNAi-sense strand
ucagaugcuaaaucucaccuu

SEQ ID NO: 8871 - RNA, 21 nt, RNAi-antisense strand
ggugagauuuagcaucugauu

SEQ ID NO: 8872 - DNA, 21 bp, Homo sapiens
aatagaacatcagatagccaa

SEQ ID NO: 8873 - RNA, 21 nt, RNAi-sense strand
uagaacaucagauagccaauu

SEQ ID NO: 8874 - RNA, 21 nt, RNAi-antisense strand
uuggcuaucugauguucuauu

SEQ ID NO: 8875 - DNA, 21 bp, Homo sapiens
aacatcagatagccaatatga

SEQ ID NO: 8876 - RNA, 21 nt, RNAi-sense strand
caucagauagccaauaugauu

SEQ ID NO: 8877 - RNA, 21 nt, RNAi-antisense strand
ucauauuggcuaucugauguu

SEQ ID NO: 8878 - DNA, 21 bp, Homo sapiens
aaatgtggttagtggaccaat

SEQ ID NO: 8879 - RNA, 21 nt, RNAi-sense strand
augugguuaguggaccaauuu

SEQ ID NO: 8880 - RNA, 21 nt, RNAi-antisense strand
auugguccacuaaccacauuu

SEQ ID NO: 8881 - DNA, 21 bp, Homo sapiens
aatgtggttagtggaccaata

SEQ ID NO: 8882 - RNA, 21 nt, RNAi-sense strand
ugugguuaguggaccaauauu

SEQ ID NO: 8883 - RNA, 21 nt, RNAi-antisense strand
uauugguccacuaaccacauu

SEQ ID NO: 8884 - DNA, 21 bp, Homo sapiens
aaacatttagccaacactgat

SEQ ID NO: 8885 - RNA, 21 nt, RNAi-sense strand
acauuuagccaacacugauuu

SEQ ID NO: 8886 - RNA, 21 nt, RNAi-antisense strand
aucaguguuggcuaaauguuu

SEQ ID NO: 8887 - DNA, 21 bp, Homo sapiens
aacatttagccaacactgatg

SEQ ID NO: 8888 - RNA, 21 nt, RNAi-sense strand
cauuuagccaacacugauguu

SEQ ID NO: 8889 - RNA, 21 nt, RNAi-antisense strand
caucaguguuggcuaaauguu

SEQ ID NO: 8890 - DNA, 21 bp, Homo sapiens
catcatttagaggactggaga

SEQ ID NO: 8891 - RNA, 21 nt, RNAi-sense strand
ucauuuagaggacuggagauu

SEQ ID NO: 8892 - RNA, 21 nt, RNAi-antisense strand
ucuccaguccucuaaaugauu

SEQ ID NO: 8893 - DNA, 21 bp, Homo sapiens
caactcgaatatggatgtgca

SEQ ID NO: 8894 - RNA, 21 nt, RNAi-sense strand
acucgaauauggaugugcauu

SEQ ID NO: 8895 - RNA, 21 nt, RNAi-antisense strand
ugcacauccauauucgaguuu

SEQ ID NO: 8896 - DNA, 21 bp, Homo sapiens
cacatggcatcattgacaata

SEQ ID NO: 8897 - RNA, 21 nt, RNAi-sense strand
cauggcaucauugacaauauu

SEQ ID NO: 8898 - RNA, 21 nt, RNAi-antisense strand
uauugucaaugaugccauguu

SEQ ID NO: 8899 - DNA, 21 bp, Homo sapiens
catatacatgccttacaacgg

SEQ ID NO: 8900 - RNA, 21 nt, RNAi-sense strand
uauacaugccuuacaacgguu

SEQ ID NO: 8901 - RNA, 21 nt, RNAi-antisense strand
ccguuguaaggcauguauauu

SEQ ID NO: 8902 - DNA, 21 bp, Homo sapiens
catgccttacaacggaagtgt

SEQ ID NO: 8903 - RNA, 21 nt, RNAi-sense strand
ugccuuacaacggaaguguuu

SEQ ID NO: 8904 - RNA, 21 nt, RNAi-antisense strand
acacuuccguuguaaggcauu

SEQ ID NO: 8905 - DNA, 21 bp, Homo sapiens
cagtcagtgccagagtaatta

SEQ ID NO: 8906 - RNA, 21 nt, RNAi-sense strand
gucagugccagaguaauuauu

SEQ ID NO: 8907 - RNA, 21 nt, RNAi-antisense strand
uaauuacucuggcacugacuu

SEQ ID NO: 8908 - DNA, 21 bp, Homo sapiens
caagatggaatacatgactga

SEQ ID NO: 8909 - RNA, 21 nt, RNAi-sense strand
agauggaauacaugacugauu

SEQ ID NO: 8910 - RNA, 21 nt, RNAi-antisense strand
ucagucauguauuccaucuuu

SEQ ID NO: 8911 - DNA, 21 bp, Homo sapiens
catccgagctcataatatacc

SEQ ID NO: 8912 - RNA, 21 nt, RNAi-sense strand
uccgagcucauaauauaccuu

SEQ ID NO: 8913 - RNA, 21 nt, RNAi-antisense strand
gguauauuaugagcucggauu

SEQ ID NO: 8914 - DNA, 21 bp, Homo sapiens
caaagcgactgcactatgcca

SEQ ID NO: 8915 - RNA, 21 nt, RNAi-sense strand
aagcgacugcacuaugccauu

SEQ ID NO: 8916 - RNA, 21 nt, RNAi-antisense strand
uggcauagugcagucgcuuuu

SEQ ID NO: 8917 - DNA, 21 bp, Homo sapiens
caagaacgtcagaatcgacaa

SEQ ID NO: 8918 - RNA, 21 nt, RNAi-sense strand
agaacgucagaaucgacaauu

SEQ ID NO: 8919 - RNA, 21 nt, RNAi-antisense strand
uugucgauucugacguucuuu

SEQ ID NO: 8920 - DNA, 21 bp, Homo sapiens
caaagttcatctctttgtgga

SEQ ID NO: 8921 - RNA, 21 nt, RNAi-sense strand
aaguucaucucuuuguggauu

SEQ ID NO: 8922 - RNA, 21 nt, RNAi-antisense strand
uccacaaagagaugaacuuuu

SEQ ID NO: 8923 - DNA, 21 bp, Homo sapiens
catggaggctatctttctggc

SEQ ID NO: 8924 - RNA, 21 nt, RNAi-sense strand
uggaggcuaucuuucuggcuu

SEQ ID NO: 8925 - RNA, 21 nt, RNAi-antisense strand
gccagaaagauagccuccauu

SEQ ID NO: 8926 - DNA, 21 bp, Homo sapiens
cattcaaccagcaccaaacaa

SEQ ID NO: 8927 - RNA, 21 nt, RNAi-sense strand
uucaaccagcaccaaacaauu

SEQ ID NO: 8928 - RNA, 21 nt, RNAi-antisense strand
uuguuuggugcugguugaauu

SEQ ID NO: 8929 - DNA, 21 bp, Homo sapiens
cagaagaacgtggaccactgt

SEQ ID NO: 8930 - RNA, 21 nt, RNAi-sense strand
gaagaacguggaccacuguuu

SEQ ID NO: 8931 - RNA, 21 nt, RNAi-antisense strand
acagugguccacguucuucuu

SEQ ID NO: 8932 - DNA, 21 bp, Homo sapiens
caatagaacatcagatagcca

SEQ ID NO: 8933 - RNA, 21 nt, RNAi-sense strand
auagaacaucagauagccauu

SEQ ID NO: 8934 - RNA, 21 nt, RNAi-antisense strand
uggcuaucugauguucuauuu

SEQ ID NO: 8935 - DNA, 21 bp, Homo sapiens
catcagatagccaatatgatg

SEQ ID NO: 8936 - RNA, 21 nt, RNAi-sense strand
ucagauagccaauaugauguu

SEQ ID NO: 8937 - RNA, 21 nt, RNAi-antisense strand
caucauauuggcuaucugauu

SEQ ID NO: 8938 - DNA, 21 bp, Homo sapiens
cagatagccaatatgatgctt

SEQ ID NO: 8939 - RNA, 21 nt, RNAi-sense strand
gauagccaauaugaugcuuuu

SEQ ID NO: 8940 - RNA, 21 nt, RNAi-antisense strand
aagcaucauauuggcuaucuu

SEQ ID NO: 8941 - DNA, 21 bp, Homo sapiens
caaacatttagccaacactga

SEQ ID NO: 8942 - RNA, 21 nt, RNAi-sense strand
aacauuuagccaacacugauu

SEQ ID NO: 8943 - RNA, 21 nt, RNAi-antisense strand
ucaguguuggcuaaauguuuu

SEQ ID NO: 8944 - DNA, 21 bp, Homo sapiens
catttagccaacactgatgtt

SEQ ID NO: 8945 - RNA, 21 nt, RNAi-sense strand
uuuagccaacacugauguuuu

SEQ ID NO: 8946 - RNA, 21 nt, RNAi-antisense strand
aacaucaguguuggcuaaauu

SEQ ID NO: 8947 - DNA, 21 bp, Homo sapiens
gatgcatcatttagaggactg

SEQ ID NO: 8948 - RNA, 21 nt, RNAi-sense strand
ugcaucauuuagaggacuguu

SEQ ID NO: 8949 - RNA, 21 nt, RNAi-antisense strand
caguccucuaaaugaugcauu

SEQ ID NO: 8950 - DNA, 21 bp, Homo sapiens
gaatcaactcgaatatggatg

SEQ ID NO: 8951 - RNA, 21 nt, RNAi-sense strand
aucaacucgaauauggauguu

SEQ ID NO: 8952 - RNA, 21 nt, RNAi-antisense strand
cauccauauucgaguugauuu

SEQ ID NO: 8953 - DNA, 21 bp, Homo sapiens
gagagaccagattagaggcca

SEQ ID NO: 8954 - RNA, 21 nt, RNAi-sense strand
gagaccagauuagaggccauu

SEQ ID NO: 8955 - RNA, 21 nt, RNAi-antisense strand
uggccucuaaucuggucucuu

SEQ ID NO: 8956 - DNA, 21 bp, Homo sapiens
gaagaaagattgctgtgctga

SEQ ID NO: 8957 - RNA, 21 nt, RNAi-sense strand
agaaagauugcugugcugauu

SEQ ID NO: 8958 - RNA, 21 nt, RNAi-antisense strand
ucagcacagcaaucuuucuuu

SEQ ID NO: 8959 - DNA, 21 bp, Homo sapiens
gattgctgtgctgactataag

SEQ ID NO: 8960 - RNA, 21 nt, RNAi-sense strand
uugcugugcugacuauaaguu

SEQ ID NO: 8961 - RNA, 21 nt, RNAi-antisense strand
cuuauagucagcacagcaauu

SEQ ID NO: 8962 - DNA, 21 bp, Homo sapiens
gactataagagtgtttgccaa

SEQ ID NO: 8963 - RNA, 21 nt, RNAi-sense strand
cuauaagaguguuugccaauu

SEQ ID NO: 8964 - RNA, 21 nt, RNAi-antisense strand
uuggcaaacacucuuauaguu

SEQ ID NO: 8965 - DNA, 21 bp, Homo sapiens
gagtcacatggcatcattgac

SEQ ID NO: 8966 - RNA, 21 nt, RNAi-sense strand
gucacauggcaucauugacuu

SEQ ID NO: 8967 - RNA, 21 nt, RNAi-antisense strand
gucaaugaugccaugugacuu

SEQ ID NO: 8968 - DNA, 21 bp, Homo sapiens
gaagtggctataaatggctcc

SEQ ID NO: 8969 - RNA, 21 nt, RNAi-sense strand
aguggcuauaaauggcuccuu

SEQ ID NO: 8970 - RNA, 21 nt, RNAi-antisense strand
ggagccauuuauagccacuuu

SEQ ID NO: 8971 - DNA, 21 bp, Homo sapiens
gaagagaggatttctacactg

SEQ ID NO: 8972 - RNA, 21 nt, RNAi-sense strand
agagaggauuucuacacuguu

SEQ ID NO: 8973 - RNA, 21 nt, RNAi-antisense strand
caguguagaaauccucucuuu

SEQ ID NO: 8974 - DNA, 21 bp, Homo sapiens
gaagcagcggaatttgcacaa

SEQ ID NO: 8975 - RNA, 21 nt, RNAi-sense strand
agcagcggaauuugcacaauu

SEQ ID NO: 8976 - RNA, 21 nt, RNAi-antisense strand
uugugcaaauuccgcugcuuu

SEQ ID NO: 8977 - DNA, 21 bp, Homo sapiens
gaatggaccagacttattgta

SEQ ID NO: 8978 - RNA, 21 nt, RNAi-sense strand
auggaccagacuuauuguauu

SEQ ID NO: 8979 - RNA, 21 nt, RNAi-antisense strand
uacaauaagucugguccauuu

SEQ ID NO: 8980 - DNA, 21 bp, Homo sapiens
gaccagacttattgtaacaag

SEQ ID NO: 8981 - RNA, 21 nt, RNAi-sense strand
ccagacuuauuguaacaaguu

SEQ ID NO: 8982 - RNA, 21 nt, RNAi-antisense strand
cuuguuacaauaagucugguu

SEQ ID NO: 8983 - DNA, 21 bp, Homo sapiens
gagctcataatatacctcatg

SEQ ID NO: 8984 - RNA, 21 nt, RNAi-sense strand
gcucauaauauaccucauguu

SEQ ID NO: 8985 - RNA, 21 nt, RNAi-antisense strand
caugagguauauuaugagcuu

SEQ ID NO: 8986 - DNA, 21 bp, Homo sapiens
gatttgccaaagcgactgcac

SEQ ID NO: 8987 - RNA, 21 nt, RNAi-sense strand
uuugccaaagcgacugcacuu

SEQ ID NO: 8988 - RNA, 21 nt, RNAi-antisense strand
gugcagucgcuuuggcaaauu

SEQ ID NO: 8989 - DNA, 21 bp, Homo sapiens
gaacgtcagaatcgacaaagt

SEQ ID NO: 8990 - RNA, 21 nt, RNAi-sense strand
acgucagaaucgacaaaguuu

SEQ ID NO: 8991 - RNA, 21 nt, RNAi-antisense strand
acuuugucgauucugacguuu

SEQ ID NO: 8992 - DNA, 21 bp, Homo sapiens
gagtttaggagcatggaggct

SEQ ID NO: 8993 - RNA, 21 nt, RNAi-sense strand
guuuaggagcauggaggcuuu

SEQ ID NO: 8994 - RNA, 21 nt, RNAi-antisense strand
agccuccaugcuccuaaacuu

SEQ ID NO: 8995 - DNA, 21 bp, Homo sapiens
gatcttctacgcattcaacca

SEQ ID NO: 8996 - RNA, 21 nt, RNAi-sense strand
ucuucuacgcauucaaccauu

SEQ ID NO: 8997 - RNA, 21 nt, RNAi-antisense strand
ugguugaaugcguagaagauu

SEQ ID NO: 8998 - DNA, 21 bp, Homo sapiens
gaatcagatgctaaatctcac

SEQ ID NO: 8999 - RNA, 21 nt, RNAi-sense strand
aucagaugcuaaaucucacuu

SEQ ID NO: 9000 - RNA, 21 nt, RNAi-antisense strand
gugagauuuagcaucugauuu

SEQ ID NO: 9001 - DNA, 21 bp, Homo sapiens
gaagaacgtggaccactgtct

SEQ ID NO: 9002 - RNA, 21 nt, RNAi-sense strand
agaacguggaccacugucuuu

SEQ ID NO: 9003 - RNA, 21 nt, RNAi-antisense strand
agacagugguccacguucuuu

SEQ ID NO: 9004 - DNA, 21 bp, Homo sapiens
gaacatcagatagccaatatg

SEQ ID NO: 9005 - RNA, 21 nt, RNAi-sense strand
acaucagauagccaauauguu

SEQ ID NO: 9006 - RNA, 21 nt, RNAi-antisense strand
cauauuggcuaucugauguuu

SEQ ID NO: 9007 - DNA, 21 bp, Homo sapiens
taaagaccgaggtgattgctg

SEQ ID NO: 9008 - RNA, 21 nt, RNAi-sense strand
aagaccgaggugauugcuguu

SEQ ID NO: 9009 - RNA, 21 nt, RNAi-antisense strand
cagcaaucaccucggucuuuu

SEQ ID NO: 9010 - DNA, 21 bp, Homo sapiens
taaatttcgttgtggagagac

SEQ ID NO: 9011 - RNA, 21 nt, RNAi-sense strand
aauuucguuguggagagacuu

SEQ ID NO: 9012 - RNA, 21 nt, RNAi-antisense strand
gucucuccacaacgaaauuuu

SEQ ID NO: 9013 - DNA, 21 bp, Homo sapiens
tatacatgccttacaacggaa

SEQ ID NO: 9014 - RNA, 21 nt, RNAi-sense strand
uacaugccuuacaacggaauu

SEQ ID NO: 9015 - RNA, 21 nt, RNAi-antisense strand
uuccguuguaaggcauguauu

SEQ ID NO: 9016 - DNA, 21 bp, Homo sapiens
tacatgccttacaacggaagt

SEQ ID NO: 9017 - RNA, 21 nt, RNAi-sense strand
caugccuuacaacggaaguuu

SEQ ID NO: 9018 - RNA, 21 nt, RNAi-antisense strand
acuuccguuguaaggcauguu

SEQ ID NO: 9019 - DNA, 21 bp, Homo sapiens
taaagccttacaggtagtaga

SEQ ID NO: 9020 - RNA, 21 nt, RNAi-sense strand
aagccuuacagguaguagauu

SEQ ID NO: 9021 - RNA, 21 nt, RNAi-antisense strand
ucuacuaccuguaaggcuuuu

SEQ ID NO: 9022 - DNA, 21 bp, Homo sapiens
tagaaacctcagttgccgaaa

SEQ ID NO: 9023 - RNA, 21 nt, RNAi-sense strand
gaaaccucaguugccgaaauu

SEQ ID NO: 9024 - RNA, 21 nt, RNAi-antisense strand
uuucggcaacugagguuucuu

SEQ ID NO: 9025 - DNA, 21 bp, Homo sapiens
tataacaatgagtttaggagc

SEQ ID NO: 9026 - RNA, 21 nt, RNAi-sense strand
uaacaaugaguuuaggagcuu

SEQ ID NO: 9027 - RNA, 21 nt, RNAi-antisense strand
gcuccuaaacucauuguuauu

SEQ ID NO: 9028 - DNA, 21 bp, Homo sapiens
tacgcattcaaccagcaccaa

SEQ ID NO: 9029 - RNA, 21 nt, RNAi-sense strand
cgcauucaaccagcaccaauu

SEQ ID NO: 9030 - RNA, 21 nt, RNAi-antisense strand
uuggugcugguugaaugcguu

SEQ ID NO: 9031 - DNA, 21 bp, Homo sapiens
tagtactcagctggaacaagt

SEQ ID NO: 9032 - RNA, 21 nt, RNAi-sense strand
guacucagcuggaacaaguuu

SEQ ID NO: 9033 - RNA, 21 nt, RNAi-antisense strand
acuuguuccagcugaguacuu

SEQ ID NO: 9034 - DNA, 21 bp, Homo sapiens
tagaacatcagatagccaata

SEQ ID NO: 9035 - RNA, 21 nt, RNAi-sense strand
gaacaucagauagccaauauu

SEQ ID NO: 9036 - RNA, 21 nt, RNAi-antisense strand
uauuggcuaucugauguucuu

SEQ ID NO: 9037 - DNA, 21 bp, Homo sapiens
taccaaacatttagccaacac

SEQ ID NO: 9038 - RNA, 21 nt, RNAi-sense strand
ccaaacauuuagccaacacuu

SEQ ID NO: 9039 - RNA, 21 nt, RNAi-antisense strand
guguuggcuaaauguuugguu

SEQ ID NO: 9040 - DNA, 21 bp, Homo sapiens
aaagaactggctgtgaccttt

SEQ ID NO: 9041 - RNA, 21 nt, RNAi-sense strand
agaacuggcugugaccuuuuu

SEQ ID NO: 9042 - RNA, 21 nt, RNAi-antisense strand
aaaggucacagccaguucuuu

SEQ ID NO: 9043 - DNA, 21 bp, Homo sapiens
aagaactggctgtgacctttg

SEQ ID NO: 9044 - RNA, 21 nt, RNAi-sense strand
gaacuggcugugaccuuuguu

SEQ ID NO: 9045 - RNA, 21 nt, RNAi-antisense strand
caaaggucacagccaguucuu

SEQ ID NO: 9046 - DNA, 21 bp, Homo sapiens
aagaggtggaagagtcctcac

SEQ ID NO: 9047 - RNA, 21 nt, RNAi-sense strand
gagguggaagaguccucacuu

SEQ ID NO: 9048 - RNA, 21 nt, RNAi-antisense strand
gugaggacucuuccaccucuu

SEQ ID NO: 9049 - DNA, 21 bp, Homo sapiens
aagagtcctcaccactgcaag

SEQ ID NO: 9050 - RNA, 21 nt, RNAi-sense strand
gaguccucaccacugcaaguu

SEQ ID NO: 9051 - RNA, 21 nt, RNAi-antisense strand
cuugcaguggugaggacucuu

SEQ ID NO: 9052 - DNA, 21 bp, Homo sapiens
aagagccaccaagccaggcag

SEQ ID NO: 9053 - RNA, 21 nt, RNAi-sense strand
gagccaccaagccaggcaguu

SEQ ID NO: 9054 - RNA, 21 nt, RNAi-antisense strand
cugccuggcuugguggcucuu

SEQ ID NO: 9055 - DNA, 21 bp, Homo sapiens
aaggcctatcagcttctatca

SEQ ID NO: 9056 - RNA, 21 nt, RNAi-sense strand
ggccuaucagcuucuaucauu

SEQ ID NO: 9057 - RNA, 21 nt, RNAi-antisense strand
ugauagaagcugauaggccuu

SEQ ID NO: 9058 - DNA, 21 bp, Homo sapiens
aacgcgctgaccaatggcgtg

SEQ ID NO: 9059 - RNA, 21 nt, RNAi-sense strand
cgcgcugaccaauggcguguu

SEQ ID NO: 9060 - RNA, 21 nt, RNAi-antisense strand
cacgccauuggucagcgcguu

SEQ ID NO: 9061 - DNA, 21 bp, Homo sapiens
aatgctgccaccatgcctgag

SEQ ID NO: 9062 - RNA, 21 nt, RNAi-sense strand
ugcugccaccaugccugaguu

SEQ ID NO: 9063 - RNA, 21 nt, RNAi-antisense strand
cucaggcaugguggcagcauu

SEQ ID NO: 9064 - DNA, 21 bp, Homo sapiens
aaggagcaggcttggagccag

SEQ ID NO: 9065 - RNA, 21 nt, RNAi-sense strand
ggagcaggcuuggagccaguu

SEQ ID NO: 9066 - RNA, 21 nt, RNAi-antisense strand
cuggcuccaagccugcuccuu

SEQ ID NO: 9067 - DNA, 21 bp, Homo sapiens
cacctgacgctagaagaagtc

SEQ ID NO: 9068 - RNA, 21 nt, RNAi-sense strand
ccugacgcuagaagaagucuu

SEQ ID NO: 9069 - RNA, 21 nt, RNAi-antisense strand
gacuucuucuagcgucagguu

SEQ ID NO: 9070 - DNA, 21 bp, Homo sapiens
caggagagccaaagcgtgtct

SEQ ID NO: 9071 - RNA, 21 nt, RNAi-sense strand
ggagagccaaagcgugucuuu

SEQ ID NO: 9072 - RNA, 21 nt, RNAi-antisense strand
agacacgcuuuggcucuccuu

SEQ ID NO: 9073 - DNA, 21 bp, Homo sapiens
cacctgctggtggctctcttc

SEQ ID NO: 9074 - RNA, 21 nt, RNAi-sense strand
ccugcugguggcucucuucuu

SEQ ID NO: 9075 - RNA, 21 nt, RNAi-antisense strand
gaagagagccaccagcagguu

SEQ ID NO: 9076 - DNA, 21 bp, Homo sapiens
caggaaaggacgagcaggtcc

SEQ ID NO: 9077 - RNA, 21 nt, RNAi-sense strand
ggaaaggacgagcagguccuu

SEQ ID NO: 9078 - RNA, 21 nt, RNAi-antisense strand
ggaccugcucguccuuuccuu

SEQ ID NO: 9079 - DNA, 21 bp, Homo sapiens
cagtggcaggacagttgcatt

SEQ ID NO: 9080 - RNA, 21 nt, RNAi-sense strand
guggcaggacaguugcauuuu

SEQ ID NO: 9081 - RNA, 21 nt, RNAi-antisense strand
aaugcaacuguccugccacuu

SEQ ID NO: 9082 - DNA, 21 bp, Homo sapiens
caggacagttgcattctgtgg

SEQ ID NO: 9083 - RNA, 21 nt, RNAi-sense strand
ggacaguugcauucugugguu

SEQ ID NO: 9084 - RNA, 21 nt, RNAi-antisense strand
ccacagaaugcaacuguccuu

SEQ ID NO: 9085 - DNA, 21 bp, Homo sapiens
cagttgcattctgtggccttc

SEQ ID NO: 9086 - RNA, 21 nt, RNAi-sense strand
guugcauucuguggccuucuu

SEQ ID NO: 9087 - RNA, 21 nt, RNAi-antisense strand
gaaggccacagaaugcaacuu

SEQ ID NO: 9088 - DNA, 21 bp, Homo sapiens
cattctgtggccttcttagca

SEQ ID NO: 9089 - RNA, 21 nt, RNAi-sense strand
uucuguggccuucuuagcauu

SEQ ID NO: 9090 - RNA, 21 nt, RNAi-antisense strand
ugcuaagaaggccacagaauu

SEQ ID NO: 9091 - DNA, 21 bp, Homo sapiens
cactggcctttgtgctggcac

SEQ ID NO: 9092 - RNA, 21 nt, RNAi-sense strand
cuggccuuugugcuggcacuu

SEQ ID NO: 9093 - RNA, 21 nt, RNAi-antisense strand
gugccagcacaaaggccaguu

SEQ ID NO: 9094 - DNA, 21 bp, Homo sapiens
cactggcatgctgtgcctcga

SEQ ID NO: 9095 - RNA, 21 nt, RNAi-sense strand
cuggcaugcugugccucgauu

SEQ ID NO: 9096 - RNA, 21 nt, RNAi-antisense strand
ucgaggcacagcaugccaguu

SEQ ID NO: 9097 - DNA, 21 bp, Homo sapiens
catgctgtgcctcgaatgtca

SEQ ID NO: 9098 - RNA, 21 nt, RNAi-sense strand
ugcugugccucgaaugucauu

SEQ ID NO: 9099 - RNA, 21 nt, RNAi-antisense strand
ugacauucgaggcacagcauu

SEQ ID NO: 9100 - DNA, 21 bp, Homo sapiens
cacctgccacctcgcttctta

SEQ ID NO: 9101 - RNA, 21 nt, RNAi-sense strand
ccugccaccucgcuucuuauu

SEQ ID NO: 9102 - RNA, 21 nt, RNAi-antisense strand
uaagaagcgagguggcagguu

SEQ ID NO: 9103 - DNA, 21 bp, Homo sapiens
cacctcgcttcttacggtcat

SEQ ID NO: 9104 - RNA, 21 nt, RNAi-sense strand
ccucgcuucuuacggucauuu

SEQ ID NO: 9105 - RNA, 21 nt, RNAi-antisense strand
augaccguaagaagcgagguu

SEQ ID NO: 9106 - DNA, 21 bp, Homo sapiens
caggagcagaggaagaggtgg

SEQ ID NO: 9107 - RNA, 21 nt, RNAi-sense strand
ggagcagaggaagaggugguu

SEQ ID NO: 9108 - RNA, 21 nt, RNAi-antisense strand
ccaccucuuccucugcuccuu

SEQ ID NO: 9109 - DNA, 21 bp, Homo sapiens
cagaggaagaggtggaagagt

SEQ ID NO: 9110 - RNA, 21 nt, RNAi-sense strand
gaggaagagguggaagaguuu

SEQ ID NO: 9111 - RNA, 21 nt, RNAi-antisense strand
acucuuccaccucuuccucuu

SEQ ID NO: 9112 - DNA, 21 bp, Homo sapiens
caccactgcaagagccaccaa

SEQ ID NO: 9113 - RNA, 21 nt, RNAi-sense strand
ccacugcaagagccaccaauu

SEQ ID NO: 9114 - RNA, 21 nt, RNAi-antisense strand
uugguggcucuugcagugguu

SEQ ID NO: 9115 - DNA, 21 bp, Homo sapiens
cactgcaagagccaccaagcc

SEQ ID NO: 9116 - RNA, 21 nt, RNAi-sense strand
cugcaagagccaccaagccuu

SEQ ID NO: 9117 - RNA, 21 nt, RNAi-antisense strand
ggcuugguggcucuugcaguu

SEQ ID NO: 9118 - DNA, 21 bp, Homo sapiens
caagagccaccaagccaggca

SEQ ID NO: 9119 - RNA, 21 nt, RNAi-sense strand
agagccaccaagccaggcauu

SEQ ID NO: 9120 - RNA, 21 nt, RNAi-antisense strand
ugccuggcuugguggcucuuu

SEQ ID NO: 9121 - DNA, 21 bp, Homo sapiens
caccaacgcgctgaccaatgg

SEQ ID NO: 9122 - RNA, 21 nt, RNAi-sense strand
ccaacgcgcugaccaaugguu

SEQ ID NO: 9123 - RNA, 21 nt, RNAi-antisense strand
ccauuggucagcgcguugguu

SEQ ID NO: 9124 - DNA, 21 bp, Homo sapiens
caacgcgctgaccaatggcgt

SEQ ID NO: 9125 - RNA, 21 nt, RNAi-sense strand
acgcgcugaccaauggcguuu

SEQ ID NO: 9126 - RNA, 21 nt, RNAi-antisense strand
acgccauuggucagcgcguuu

SEQ ID NO: 9127 - DNA, 21 bp, Homo sapiens
cagcatctatcacgtgttcca

SEQ ID NO: 9128 - RNA, 21 nt, RNAi-sense strand
gcaucuaucacguguuccauu

SEQ ID NO: 9129 - RNA, 21 nt, RNAi-antisense strand
uggaacacgugauagaugcuu

SEQ ID NO: 9130 - DNA, 21 bp, Homo sapiens
catctatcacgtgttccacag

SEQ ID NO: 9131 - RNA, 21 nt, RNAi-sense strand
ucuaucacguguuccacaguu

SEQ ID NO: 9132 - RNA, 21 nt, RNAi-antisense strand
cuguggaacacgugauagauu

SEQ ID NO: 9133 - DNA, 21 bp, Homo sapiens
cacgtgttccacagcagaaag

SEQ ID NO: 9134 - RNA, 21 nt, RNAi-sense strand
cguguuccacagcagaaaguu

SEQ ID NO: 9135 - RNA, 21 nt, RNAi-antisense strand
cuuucugcuguggaacacguu

SEQ ID NO: 9136 - DNA, 21 bp, Homo sapiens
cacagcagaaaggactgtgca

SEQ ID NO: 9137 - RNA, 21 nt, RNAi-sense strand
cagcagaaaggacugugcauu

SEQ ID NO: 9138 - RNA, 21 nt, RNAi-antisense strand
ugcacaguccuuucugcuguu

SEQ ID NO: 9139 - DNA, 21 bp, Homo sapiens
cagcagaaaggactgtgcaga

SEQ ID NO: 9140 - RNA, 21 nt, RNAi-sense strand
gcagaaaggacugugcagauu

SEQ ID NO: 9141 - RNA, 21 nt, RNAi-antisense strand
ucugcacaguccuuucugcuu

SEQ ID NO: 9142 - DNA, 21 bp, Homo sapiens
caatgctgccaccatgcctga

SEQ ID NO: 9143 - RNA, 21 nt, RNAi-sense strand
augcugccaccaugccugauu

SEQ ID NO: 9144 - RNA, 21 nt, RNAi-antisense strand
ucaggcaugguggcagcauuu

SEQ ID NO: 9145 - DNA, 21 bp, Homo sapiens
caccatgcctgagtgcctgca

SEQ ID NO: 9146 - RNA, 21 nt, RNAi-sense strand
ccaugccugagugccugcauu

SEQ ID NO: 9147 - RNA, 21 nt, RNAi-antisense strand
ugcaggcacucaggcaugguu

SEQ ID NO: 9148 - DNA, 21 bp, Homo sapiens
cacaccggtacactcgtggac

SEQ ID NO: 9149 - RNA, 21 nt, RNAi-sense strand
caccgguacacucguggacuu

SEQ ID NO: 9150 - RNA, 21 nt, RNAi-antisense strand
guccacgaguguaccgguguu

SEQ ID NO: 9151 - DNA, 21 bp, Homo sapiens
caccggtacactcgtggacac

SEQ ID NO: 9152 - RNA, 21 nt, RNAi-sense strand
ccgguacacucguggacacuu

SEQ ID NO: 9153 - RNA, 21 nt, RNAi-antisense strand
guguccacgaguguaccgguu

SEQ ID NO: 9154 - DNA, 21 bp, Homo sapiens
cactcgtggacacctacacac

SEQ ID NO: 9155 - RNA, 21 nt, RNAi-sense strand
cucguggacaccuacacacuu

SEQ ID NO: 9156 - RNA, 21 nt, RNAi-antisense strand
guguguagguguccacgaguu

SEQ ID NO: 9157 - DNA, 21 bp, Homo sapiens
cacctacacactccataggag

SEQ ID NO: 9158 - RNA, 21 nt, RNAi-sense strand
ccuacacacuccauaggaguu

SEQ ID NO: 9159 - RNA, 21 nt, RNAi-antisense strand
cuccuauggaguguguagguu

SEQ ID NO: 9160 - DNA, 21 bp, Homo sapiens
cacactccataggagatcctg

SEQ ID NO: 9161 - RNA, 21 nt, RNAi-sense strand
cacuccauaggagauccuguu

SEQ ID NO: 9162 - RNA, 21 nt, RNAi-antisense strand
caggaucuccuauggaguguu

SEQ ID NO: 9163 - DNA, 21 bp, Homo sapiens
cactccataggagatcctggc

SEQ ID NO: 9164 - RNA, 21 nt, RNAi-sense strand
cuccauaggagauccuggcuu

SEQ ID NO: 9165 - RNA, 21 nt, RNAi-antisense strand
gccaggaucuccuauggaguu

SEQ ID NO: 9166 - DNA, 21 bp, Homo sapiens
cataggagatcctggctttcc

SEQ ID NO: 9167 - RNA, 21 nt, RNAi-sense strand
uaggagauccuggcuuuccuu

SEQ ID NO: 9168 - RNA, 21 nt, RNAi-antisense strand
ggaaagccaggaucuccuauu

SEQ ID NO: 9169 - DNA, 21 bp, Homo sapiens
caaggagcaggcttggagcca

SEQ ID NO: 9170 - RNA, 21 nt, RNAi-sense strand
aggagcaggcuuggagccauu

SEQ ID NO: 9171 - RNA, 21 nt, RNAi-antisense strand
uggcuccaagccugcuccuuu

SEQ ID NO: 9172 - DNA, 21 bp, Homo sapiens
gacgctagaagaagtcttcac

SEQ ID NO: 9173 - RNA, 21 nt, RNAi-sense strand
cgcuagaagaagucuucacuu

SEQ ID NO: 9174 - RNA, 21 nt, RNAi-antisense strand
gugaagacuucuucuagcguu

SEQ ID NO: 9175 - DNA, 21 bp, Homo sapiens
gagagccaaagcgtgtctggc

SEQ ID NO: 9176 - RNA, 21 nt, RNAi-sense strand
gagccaaagcgugucuggcuu

SEQ ID NO: 9177 - RNA, 21 nt, RNAi-antisense strand
gccagacacgcuuuggcucuu

SEQ ID NO: 9178 - DNA, 21 bp, Homo sapiens
gaactggctgtgacctttgcc

SEQ ID NO: 9179 - RNA, 21 nt, RNAi-sense strand
acuggcugugaccuuugccuu

SEQ ID NO: 9180 - RNA, 21 nt, RNAi-antisense strand
ggcaaaggucacagccaguuu

SEQ ID NO: 9181 - DNA, 21 bp, Homo sapiens
gagctacctgtggtggtcaaa

SEQ ID NO: 9182 - RNA, 21 nt, RNAi-sense strand
gcuaccugugguggucaaauu

SEQ ID NO: 9183 - RNA, 21 nt, RNAi-antisense strand
uuugaccaccacagguagcuu

SEQ ID NO: 9184 - DNA, 21 bp, Homo sapiens
gacagttgcattctgtggcct

SEQ ID NO: 9185 - RNA, 21 nt, RNAi-sense strand
caguugcauucuguggccuuu

SEQ ID NO: 9186 - RNA, 21 nt, RNAi-antisense strand
aggccacagaaugcaacuguu

SEQ ID NO: 9187 - DNA, 21 bp, Homo sapiens
gagttaggatcaggcctccag

SEQ ID NO: 9188 - RNA, 21 nt, RNAi-sense strand
guuaggaucaggccuccaguu

SEQ ID NO: 9189 - RNA, 21 nt, RNAi-antisense strand
cuggaggccugauccuaacuu

SEQ ID NO: 9190 - DNA, 21 bp, Homo sapiens
gagcagaggaagaggtggaag

SEQ ID NO: 9191 - RNA, 21 nt, RNAi-sense strand
gcagaggaagagguggaaguu

SEQ ID NO: 9192 - RNA, 21 nt, RNAi-antisense strand
cuuccaccucuuccucugcuu

SEQ ID NO: 9193 - DNA, 21 bp, Homo sapiens
gaggaagaggtggaagagtcc

SEQ ID NO: 9194 - RNA, 21 nt, RNAi-sense strand
ggaagagguggaagaguccuu

SEQ ID NO: 9195 - RNA, 21 nt, RNAi-antisense strand
ggacucuuccaccucuuccuu

SEQ ID NO: 9196 - DNA, 21 bp, Homo sapiens
gaagaggtggaagagtcctca

SEQ ID NO: 9197 - RNA, 21 nt, RNAi-sense strand
agagguggaagaguccucauu

SEQ ID NO: 9198 - RNA, 21 nt, RNAi-antisense strand
ugaggacucuuccaccucuuu

SEQ ID NO: 9199 - DNA, 21 bp, Homo sapiens
gaggtggaagagtcctcacca

SEQ ID NO: 9200 - RNA, 21 nt, RNAi-sense strand
gguggaagaguccucaccauu

SEQ ID NO: 9201 - RNA, 21 nt, RNAi-antisense strand
uggugaggacucuuccaccuu

SEQ ID NO: 9202 - DNA, 21 bp, Homo sapiens
gaagagtcctcaccactgcaa

SEQ ID NO: 9203 - RNA, 21 nt, RNAi-sense strand
agaguccucaccacugcaauu

SEQ ID NO: 9204 - RNA, 21 nt, RNAi-antisense strand
uugcaguggugaggacucuuu

SEQ ID NO: 9205 - DNA, 21 bp, Homo sapiens
gagtcctcaccactgcaagag

SEQ ID NO: 9206 - RNA, 21 nt, RNAi-sense strand
guccucaccacugcaagaguu

SEQ ID NO: 9207 - RNA, 21 nt, RNAi-antisense strand
cucuugcaguggugaggacuu

SEQ ID NO: 9208 - DNA, 21 bp, Homo sapiens
gaccagcatctatcacgtgtt

SEQ ID NO: 9209 - RNA, 21 nt, RNAi-sense strand
ccagcaucuaucacguguuuu

SEQ ID NO: 9210 - RNA, 21 nt, RNAi-antisense strand
aacacgugauagaugcugguu

SEQ ID NO: 9211 - DNA, 21 bp, Homo sapiens
gacacctacacactccatagg

SEQ ID NO: 9212 - RNA, 21 nt, RNAi-sense strand
caccuacacacuccauagguu

SEQ ID NO: 9213 - RNA, 21 nt, RNAi-antisense strand
ccuauggaguguguagguguu

SEQ ID NO: 9214 - DNA, 21 bp, Homo sapiens
gacctacatgtggtttgcgta

SEQ ID NO: 9215 - RNA, 21 nt, RNAi-sense strand
ccuacaugugguuugcguauu

SEQ ID NO: 9216 - RNA, 21 nt, RNAi-antisense strand
uacgcaaaccacauguagguu

SEQ ID NO: 9217 - DNA, 21 bp, Homo sapiens
tacctgtggtggtcaaagagc

SEQ ID NO: 9218 - RNA, 21 nt, RNAi-sense strand
ccugugguggucaaagagcuu

SEQ ID NO: 9219 - RNA, 21 nt, RNAi-antisense strand
gcucuuugaccaccacagguu

SEQ ID NO: 9220 - DNA, 21 bp, Homo sapiens
tacgtctctgtgcttgtggct

SEQ ID NO: 9221 - RNA, 21 nt, RNAi-sense strand
cgucucugugcuuguggcuuu

SEQ ID NO: 9222 - RNA, 21 nt, RNAi-antisense strand
agccacaagcacagagacguu

SEQ ID NO: 9223 - DNA, 21 bp, Homo sapiens
tagcactggcctttgtgctgg

SEQ ID NO: 9224 - RNA, 21 nt, RNAi-sense strand
gcacuggccuuugugcugguu

SEQ ID NO: 9225 - RNA, 21 nt, RNAi-antisense strand
ccagcacaaaggccagugcuu

SEQ ID NO: 9226 - DNA, 21 bp, Homo sapiens
taggatcaggcctccaggtgg

SEQ ID NO: 9227 - RNA, 21 nt, RNAi-sense strand
ggaucaggccuccaggugguu

SEQ ID NO: 9228 - RNA, 21 nt, RNAi-antisense strand
ccaccuggaggccugauccuu

SEQ ID NO: 9229 - DNA, 21 bp, Homo sapiens
taaggcctatcagcttctatc

SEQ ID NO: 9230 - RNA, 21 nt, RNAi-sense strand
aggccuaucagcuucuaucuu

SEQ ID NO: 9231 - RNA, 21 nt, RNAi-antisense strand
gauagaagcugauaggccuuu

SEQ ID NO: 9232 - DNA, 21 bp, Homo sapiens
taccacctggctgtggtgctg

SEQ ID NO: 9233 - RNA, 21 nt, RNAi-sense strand
ccaccuggcuguggugcuguu

SEQ ID NO: 9234 - RNA, 21 nt, RNAi-antisense strand
cagcaccacagccaggugguu

SEQ ID NO: 9235 - DNA, 21 bp, Homo sapiens
tacctgatggcgctggcagtc

SEQ ID NO: 9236 - RNA, 21 nt, RNAi-sense strand
ccugauggcgcuggcagucuu

SEQ ID NO: 9237 - RNA, 21 nt, RNAi-antisense strand
gacugccagcgccaucagguu

SEQ ID NO: 9238 - DNA, 21 bp, Homo sapiens
tacgtgaaggtggcagccagc

SEQ ID NO: 9239 - RNA, 21 nt, RNAi-sense strand
cgugaagguggcagccagcuu

SEQ ID NO: 9240 - RNA, 21 nt, RNAi-antisense strand
gcuggcugccaccuucacguu

SEQ ID NO: 9241 - DNA, 21 bp, Homo sapiens
tatcacgtgttccacagcaga

SEQ ID NO: 9242 - RNA, 21 nt, RNAi-sense strand
ucacguguuccacagcagauu

SEQ ID NO: 9243 - RNA, 21 nt, RNAi-antisense strand
ucugcuguggaacacgugauu

SEQ ID NO: 9244 - DNA, 21 bp, Homo sapiens
tacactcgtggacacctacac

SEQ ID NO: 9245 - RNA, 21 nt, RNAi-sense strand
cacucguggacaccuacacuu

SEQ ID NO: 9246 - RNA, 21 nt, RNAi-antisense strand
guguagguguccacgaguguu

SEQ ID NO: 9247 - DNA, 21 bp, Homo sapiens
tacacactccataggagatcc

SEQ ID NO: 9248 - RNA, 21 nt, RNAi-sense strand
cacacuccauaggagauccuu

SEQ ID NO: 9249 - RNA, 21 nt, RNAi-antisense strand
ggaucuccuauggaguguguu

SEQ ID NO: 9250 - DNA, 21 bp, Homo sapiens
taggagatcctggctttccag

SEQ ID NO: 9251 - RNA, 21 nt, RNAi-sense strand
ggagauccuggcuuuccaguu

SEQ ID NO: 9252 - RNA, 21 nt, RNAi-antisense strand
cuggaaagccaggaucuccuu

SEQ ID NO: 9253 - DNA, 21 bp, Homo sapiens
tacatgtggtttgcgtaataa

SEQ ID NO: 9254 - RNA, 21 nt, RNAi-sense strand
caugugguuugcguaauaauu

SEQ ID NO: 9255 - RNA, 21 nt, RNAi-antisense strand
uuauuacgcaaaccacauguu

SEQ ID NO: 9256 - DNA, 21 bp, Homo sapiens
catgctgtgcctcgaatgtca

SEQ ID NO: 9257 - RNA, 21 nt, RNAi-sense strand
ugcugugccucgaaugucauu

SEQ ID NO: 9258 - RNA, 21 nt, RNAi-antisense strand
ugacauucgaggcacagcauu

SEQ ID NO: 9259 - DNA, 21 bp, Homo sapiens
cacctcgcttcttacggtcat

SEQ ID NO: 9260 - RNA, 21 nt, RNAi-sense strand
ccucgcuucuuacggucauuu

SEQ ID NO: 9261 - RNA, 21 nt, RNAi-antisense strand
augaccguaagaagcgagguu

SEQ ID NO: 9262 - DNA, 21 bp, Homo sapiens
gagctacctgtggtggtcaaa

SEQ ID NO: 9263 - RNA, 21 nt, RNAi-sense strand
gcuaccugugguggucaaauu

SEQ ID NO: 9264 - RNA, 21 nt, RNAi-antisense strand
uuugaccaccacagguagcuu

SEQ ID NO: 9265 - DNA, 21 bp, Homo sapiens
aaacactgctgtggtggagaa

SEQ ID NO: 9266 - RNA, 21 nt, RNAi-sense strand
acacugcugugguggagaauu

SEQ ID NO: 9267 - RNA, 21 nt, RNAi-antisense strand
uucuccaccacagcaguguuu

SEQ ID NO: 9268 - DNA, 21 bp, Homo sapiens
aacactgctgtggtggagaaa

SEQ ID NO: 9269 - RNA, 21 nt, RNAi-sense strand
cacugcugugguggagaaauu

SEQ ID NO: 9270 - RNA, 21 nt, RNAi-antisense strand
uuucuccaccacagcaguguu

SEQ ID NO: 9271 - DNA, 21 bp, Homo sapiens
aagcgaggcattagtgagatt

SEQ ID NO: 9272 - RNA, 21 nt, RNAi-sense strand
gcgaggcauuagugagauuuu

SEQ ID NO: 9273 - RNA, 21 nt, RNAi-antisense strand
aaucucacuaaugccucgcuu

SEQ ID NO: 9274 - DNA, 21 bp, Homo sapiens
aatctccttcacgaaaccgac

SEQ ID NO: 9275 - RNA, 21 nt, RNAi-sense strand
ucuccuucacgaaaccgacuu

SEQ ID NO: 9276 - RNA, 21 nt, RNAi-antisense strand
gucgguuucgugaaggagauu

SEQ ID NO: 9277 - DNA, 21 bp, Homo sapiens
aaaccgactcggctgtggcca

SEQ ID NO: 9278 - RNA, 21 nt, RNAi-sense strand
accgacucggcuguggccauu

SEQ ID NO: 9279 - RNA, 21 nt, RNAi-antisense strand
uggccacagccgagucgguuu

SEQ ID NO: 9280 - DNA, 21 bp, Homo sapiens
aaatcctccaatgaagctact

SEQ ID NO: 9281 - RNA, 21 nt, RNAi-sense strand
auccuccaaugaagcuacuuu

SEQ ID NO: 9282 - RNA, 21 nt, RNAi-antisense strand
aguagcuucauuggaggauuu

SEQ ID NO: 9283 - DNA, 21 bp, Homo sapiens
aatcctccaatgaagctacta

SEQ ID NO: 9284 - RNA, 21 nt, RNAi-sense strand
uccuccaaugaagcuacuauu

SEQ ID NO: 9285 - RNA, 21 nt, RNAi-antisense strand
uaguagcuucauuggaggauu

SEQ ID NO: 9286 - DNA, 21 bp, Homo sapiens
aagctactaacattactccaa

SEQ ID NO: 9287 - RNA, 21 nt, RNAi-sense strand
gcuacuaacauuacuccaauu

SEQ ID NO: 9288 - RNA, 21 nt, RNAi-antisense strand
uuggaguaauguuaguagcuu

SEQ ID NO: 9289 - DNA, 21 bp, Homo sapiens
aattgaaagctgagaacatca

SEQ ID NO: 9290 - RNA, 21 nt, RNAi-sense strand
uugaaagcugagaacaucauu

SEQ ID NO: 9291 - RNA, 21 nt, RNAi-antisense strand
ugauguucucagcuuucaauu

SEQ ID NO: 9292 - DNA, 21 bp, Homo sapiens
aaagctgagaacatcaagaag

SEQ ID NO: 9293 - RNA, 21 nt, RNAi-sense strand
agcugagaacaucaagaaguu

SEQ ID NO: 9294 - RNA, 21 nt, RNAi-antisense strand
cuucuugauguucucagcuuu

SEQ ID NO: 9295 - DNA, 21 bp, Homo sapiens
aagctgagaacatcaagaagt

SEQ ID NO: 9296 - RNA, 21 nt, RNAi-sense strand
gcugagaacaucaagaaguuu

SEQ ID NO: 9297 - RNA, 21 nt, RNAi-antisense strand
acuucuugauguucucagcuu

SEQ ID NO: 9298 - DNA, 21 bp, Homo sapiens
aaactttcagcttgcaaagca

SEQ ID NO: 9299 - RNA, 21 nt, RNAi-sense strand
acuuucagcuugcaaagcauu

SEQ ID NO: 9300 - RNA, 21 nt, RNAi-antisense strand
ugcuuugcaagcugaaaguuu

SEQ ID NO: 9301 - DNA, 21 bp, Homo sapiens
aactttcagcttgcaaagcaa

SEQ ID NO: 9302 - RNA, 21 nt, RNAi-sense strand
cuuucagcuugcaaagcaauu

SEQ ID NO: 9303 - RNA, 21 nt, RNAi-antisense strand
uugcuuugcaagcugaaaguu

SEQ ID NO: 9304 - DNA, 21 bp, Homo sapiens
aaagaatttggcctggattct

SEQ ID NO: 9305 - RNA, 21 nt, RNAi-sense strand
agaauuuggccuggauucuuu

SEQ ID NO: 9306 - RNA, 21 nt, RNAi-antisense strand
agaauccaggccaaauucuuu

SEQ ID NO: 9307 - DNA, 21 bp, Homo sapiens
aagaatttggcctggattctg

SEQ ID NO: 9308 - RNA, 21 nt, RNAi-sense strand
gaauuuggccuggauucuguu

SEQ ID NO: 9309 - RNA, 21 nt, RNAi-antisense strand
cagaauccaggccaaauucuu

SEQ ID NO: 9310 - DNA, 21 bp, Homo sapiens
aatttggcctggattctgttg

SEQ ID NO: 9311 - RNA, 21 nt, RNAi-sense strand
uuuggccuggauucuguuguu

SEQ ID NO: 9312 - RNA, 21 nt, RNAi-antisense strand
caacagaauccaggccaaauu

SEQ ID NO: 9313 - DNA, 21 bp, Homo sapiens
aaccacctcctccaggatatg

SEQ ID NO: 9314 - RNA, 21 nt, RNAi-sense strand
ccaccuccuccaggauauguu

SEQ ID NO: 9315 - RNA, 21 nt, RNAi-antisense strand
cauauccuggaggaggugguu

SEQ ID NO: 9316 - DNA, 21 bp, Homo sapiens
aaatgtttcggatattgtacc

SEQ ID NO: 9317 - RNA, 21 nt, RNAi-sense strand
auguuucggauauuguaccuu

SEQ ID NO: 9318 - RNA, 21 nt, RNAi-antisense strand
gguacaauauccgaaacauuu

SEQ ID NO: 9319 - DNA, 21 bp, Homo sapiens
aatgtttcggatattgtacca

SEQ ID NO: 9320 - RNA, 21 nt, RNAi-sense strand
uguuucggauauuguaccauu

SEQ ID NO: 9321 - RNA, 21 nt, RNAi-antisense strand
ugguacaauauccgaaacauu

SEQ ID NO: 9322 - DNA, 21 bp, Homo sapiens
aactatgcacgaactgaagac

SEQ ID NO: 9323 - RNA, 21 nt, RNAi-sense strand
cuaugcacgaacugaagacuu

SEQ ID NO: 9324 - RNA, 21 nt, RNAi-antisense strand
gucuucaguucgugcauaguu

SEQ ID NO: 9325 - DNA, 21 bp, Homo sapiens
aattgtaattgccagatatgg

SEQ ID NO: 9326 - RNA, 21 nt, RNAi-sense strand
uuguaauugccagauaugguu

SEQ ID NO: 9327 - RNA, 21 nt, RNAi-antisense strand
ccauaucuggcaauuacaauu

SEQ ID NO: 9328 - DNA, 21 bp, Homo sapiens
aaaggagtcattctctactcc

SEQ ID NO: 9329 - RNA, 21 nt, RNAi-sense strand
aggagucauucucuacuccuu

SEQ ID NO: 9330 - RNA, 21 nt, RNAi-antisense strand
ggaguagagaaugacuccuuu

SEQ ID NO: 9331 - DNA, 21 bp, Homo sapiens
aaggagtcattctctactccg

SEQ ID NO: 9332 - RNA, 21 nt, RNAi-sense strand
ggagucauucucuacuccguu

SEQ ID NO: 9333 - RNA, 21 nt, RNAi-antisense strand
cggaguagagaaugacuccuu

SEQ ID NO: 9334 - DNA, 21 bp, Homo sapiens
aagtcctatccagatggttgg

SEQ ID NO: 9335 - RNA, 21 nt, RNAi-sense strand
guccuauccagaugguugguu

SEQ ID NO: 9336 - RNA, 21 nt, RNAi-antisense strand
ccaaccaucuggauaggacuu

SEQ ID NO: 9337 - DNA, 21 bp, Homo sapiens
aatcttcctggaggtggtgtc

SEQ ID NO: 9338 - RNA, 21 nt, RNAi-sense strand
ucuuccuggagguggugucuu

SEQ ID NO: 9339 - RNA, 21 nt, RNAi-antisense strand
gacaccaccuccaggaagauu

SEQ ID NO: 9340 - DNA, 21 bp, Homo sapiens
aaatctgaatggtgcaggaga

SEQ ID NO: 9341 - RNA, 21 nt, RNAi-sense strand
aucugaauggugcaggagauu

SEQ ID NO: 9342 - RNA, 21 nt, RNAi-antisense strand
ucuccugcaccauucagauuu

SEQ ID NO: 9343 - DNA, 21 bp, Homo sapiens
aatctgaatggtgcaggagac

SEQ ID NO: 9344 - RNA, 21 nt, RNAi-sense strand
ucugaauggugcaggagacuu

SEQ ID NO: 9345 - RNA, 21 nt, RNAi-antisense strand
gucuccugcaccauucagauu

SEQ ID NO: 9346 - DNA, 21 bp, Homo sapiens
aaatgaatatgcttataggcg

SEQ ID NO: 9347 - RNA, 21 nt, RNAi-sense strand
augaauaugcuuauaggcguu

SEQ ID NO: 9348 - RNA, 21 nt, RNAi-antisense strand
cgccuauaagcauauucauuu

SEQ ID NO: 9349 - DNA, 21 bp, Homo sapiens
aatgaatatgcttataggcgt

SEQ ID NO: 9350 - RNA, 21 nt, RNAi-sense strand
ugaauaugcuuauaggcguuu

SEQ ID NO: 9351 - RNA, 21 nt, RNAi-antisense strand
acgccuauaagcauauucauu

SEQ ID NO: 9352 - DNA, 21 bp, Homo sapiens
aatatgcttataggcgtggaa

SEQ ID NO: 9353 - RNA, 21 nt, RNAi-sense strand
uaugcuuauaggcguggaauu

SEQ ID NO: 9354 - RNA, 21 nt, RNAi-antisense strand
uuccacgccuauaagcauauu

SEQ ID NO: 9355 - DNA, 21 bp, Homo sapiens
aattgcagaggctgttggtct

SEQ ID NO: 9356 - RNA, 21 nt, RNAi-sense strand
uugcagaggcuguuggucuuu

SEQ ID NO: 9357 - RNA, 21 nt, RNAi-antisense strand
agaccaacagccucugcaauu

SEQ ID NO: 9358 - DNA, 21 bp, Homo sapiens
aagtattcctgttcatccaat

SEQ ID NO: 9359 - RNA, 21 nt, RNAi-sense strand
guauuccuguucauccaauuu

SEQ ID NO: 9360 - RNA, 21 nt, RNAi-antisense strand
auuggaugaacaggaauacuu

SEQ ID NO: 9361 - DNA, 21 bp, Homo sapiens
aattggatactatgatgcaca

SEQ ID NO: 9362 - RNA, 21 nt, RNAi-sense strand
uuggauacuaugaugcacauu

SEQ ID NO: 9363 - RNA, 21 nt, RNAi-antisense strand
ugugcaucauaguauccaauu

SEQ ID NO: 9364 - DNA, 21 bp, Homo sapiens
aatgttggacctggctttact

SEQ ID NO: 9365 - RNA, 21 nt, RNAi-sense strand
uguuggaccuggcuuuacuuu

SEQ ID NO: 9366 - RNA, 21 nt, RNAi-antisense strand
aguaaagccagguccaacauu

SEQ ID NO: 9367 - DNA, 21 bp, Homo sapiens
aaagtcaagatgcacatccac

SEQ ID NO: 9368 - RNA, 21 nt, RNAi-sense strand
agucaagaugcacauccacuu

SEQ ID NO: 9369 - RNA, 21 nt, RNAi-antisense strand
guggaugugcaucuugacuuu

SEQ ID NO: 9370 - DNA, 21 bp, Homo sapiens
aagtcaagatgcacatccact

SEQ ID NO: 9371 - RNA, 21 nt, RNAi-sense strand
gucaagaugcacauccacuuu

SEQ ID NO: 9372 - RNA, 21 nt, RNAi-antisense strand
aguggaugugcaucuugacuu

SEQ ID NO: 9373 - DNA, 21 bp, Homo sapiens
aagatgcacatccactctacc

SEQ ID NO: 9374 - RNA, 21 nt, RNAi-sense strand
gaugcacauccacucuaccuu

SEQ ID NO: 9375 - RNA, 21 nt, RNAi-antisense strand
gguagaguggaugugcaucuu

SEQ ID NO: 9376 - DNA, 21 bp, Homo sapiens
aatgtgataggtactctcaga

SEQ ID NO: 9377 - RNA, 21 nt, RNAi-sense strand
ugugauagguacucucagauu

SEQ ID NO: 9378 - RNA, 21 nt, RNAi-antisense strand
ucugagaguaccuaucacauu

SEQ ID NO: 9379 - DNA, 21 bp, Homo sapiens
aaccagacagatatgtcattc

SEQ ID NO: 9380 - RNA, 21 nt, RNAi-sense strand
ccagacagauaugucauucuu

SEQ ID NO: 9381 - RNA, 21 nt, RNAi-antisense strand
gaaugacauaucugucugguu

SEQ ID NO: 9382 - DNA, 21 bp, Homo sapiens
aaattgtgaggagctttggaa

SEQ ID NO: 9383 - RNA, 21 nt, RNAi-sense strand
auugugaggagcuuuggaauu

SEQ ID NO: 9384 - RNA, 21 nt, RNAi-antisense strand
uuccaaagcuccucacaauuu

SEQ ID NO: 9385 - DNA, 21 bp, Homo sapiens
aattgtgaggagctttggaac

SEQ ID NO: 9386 - RNA, 21 nt, RNAi-sense strand
uugugaggagcuuuggaacuu

SEQ ID NO: 9387 - RNA, 21 nt, RNAi-antisense strand
guuccaaagcuccucacaauu

SEQ ID NO: 9388 - DNA, 21 bp, Homo sapiens
aagaatttggtcttcttggtt

SEQ ID NO: 9389 - RNA, 21 nt, RNAi-sense strand
gaauuuggucuucuugguuuu

SEQ ID NO: 9390 - RNA, 21 nt, RNAi-antisense strand
aaccaagaagaccaaauucuu

SEQ ID NO: 9391 - DNA, 21 bp, Homo sapiens
aatttggtcttcttggttcta

SEQ ID NO: 9392 - RNA, 21 nt, RNAi-sense strand
uuuggucuucuugguucuauu

SEQ ID NO: 9393 - RNA, 21 nt, RNAi-antisense strand
uagaaccaagaagaccaaauu

SEQ ID NO: 9394 - DNA, 21 bp, Homo sapiens
aattcaagactccttcaagag

SEQ ID NO: 9395 - RNA, 21 nt, RNAi-sense strand
uucaagacuccuucaagaguu

SEQ ID NO: 9396 - RNA, 21 nt, RNAi-antisense strand
cucuugaaggagucuugaauu

SEQ ID NO: 9397 - DNA, 21 bp, Homo sapiens
aagactccttcaagagcgtgg

SEQ ID NO: 9398 - RNA, 21 nt, RNAi-sense strand
gacuccuucaagagcgugguu

SEQ ID NO: 9399 - RNA, 21 nt, RNAi-antisense strand
ccacgcucuugaaggagucuu

SEQ ID NO: 9400 - DNA, 21 bp, Homo sapiens
aagagcgtggcgtggcttata

SEQ ID NO: 9401 - RNA, 21 nt, RNAi-sense strand
gagcguggcguggcuuauauu

SEQ ID NO: 9402 - RNA, 21 nt, RNAi-antisense strand
uauaagccacgccacgcucuu

SEQ ID NO: 9403 - DNA, 21 bp, Homo sapiens
aatgctgactcatctatagaa

SEQ ID NO: 9404 - RNA, 21 nt, RNAi-sense strand
ugcugacucaucuauagaauu

SEQ ID NO: 9405 - RNA, 21 nt, RNAi-antisense strand
uucuauagaugagucagcauu

SEQ ID NO: 9406 - DNA, 21 bp, Homo sapiens
aaggaaactacactctgagag

SEQ ID NO: 9407 - RNA, 21 nt, RNAi-sense strand
ggaaacuacacucugagaguu

SEQ ID NO: 9408 - RNA, 21 nt, RNAi-antisense strand
cucucagaguguaguuuccuu

SEQ ID NO: 9409 - DNA, 21 bp, Homo sapiens
aaactacactctgagagttga

SEQ ID NO: 9410 - RNA, 21 nt, RNAi-sense strand
acuacacucugagaguugauu

SEQ ID NO: 9411 - RNA, 21 nt, RNAi-antisense strand
ucaacucucagaguguaguuu

SEQ ID NO: 9412 - DNA, 21 bp, Homo sapiens
aactacactctgagagttgat

SEQ ID NO: 9413 - RNA, 21 nt, RNAi-sense strand
cuacacucugagaguugauuu

SEQ ID NO: 9414 - RNA, 21 nt, RNAi-antisense strand
aucaacucucagaguguaguu

SEQ ID NO: 9415 - DNA, 21 bp, Homo sapiens
aaggctttgaaggcaaatctc

SEQ ID NO: 9416 - RNA, 21 nt, RNAi-sense strand
ggcuuugaaggcaaaucucuu

SEQ ID NO: 9417 - RNA, 21 nt, RNAi-antisense strand
gagauuugccuucaaagccuu

SEQ ID NO: 9418 - DNA, 21 bp, Homo sapiens
aacgacttggaattgcttcag

SEQ ID NO: 9419 - RNA, 21 nt, RNAi-sense strand
cgacuuggaauugcuucaguu

SEQ ID NO: 9420 - RNA, 21 nt, RNAi-antisense strand
cugaagcaauuccaagucguu

SEQ ID NO: 9421 - DNA, 21 bp, Homo sapiens
aattgcttcaggcagagcacg

SEQ ID NO: 9422 - RNA, 21 nt, RNAi-sense strand
uugcuucaggcagagcacguu

SEQ ID NO: 9423 - RNA, 21 nt, RNAi-antisense strand
cgugcucugccugaagcaauu

SEQ ID NO: 9424 - DNA, 21 bp, Homo sapiens
aaacaaacaaattcagcggct

SEQ ID NO: 9425 - RNA, 21 nt, RNAi-sense strand
acaaacaaauucagcggcuuu

SEQ ID NO: 9426 - RNA, 21 nt, RNAi-antisense strand
agccgcugaauuuguuuguuu

SEQ ID NO: 9427 - DNA, 21 bp, Homo sapiens
aacaaacaaattcagcggcta

SEQ ID NO: 9428 - RNA, 21 nt, RNAi-sense strand
caaacaaauucagcggcuauu

SEQ ID NO: 9429 - RNA, 21 nt, RNAi-antisense strand
uagccgcugaauuuguuuguu

SEQ ID NO: 9430 - DNA, 21 bp, Homo sapiens
aaacaaattcagcggctatcc

SEQ ID NO: 9431 - RNA, 21 nt, RNAi-sense strand
acaaauucagcggcuauccuu

SEQ ID NO: 9432 - RNA, 21 nt, RNAi-antisense strand
ggauagccgcugaauuuguuu

SEQ ID NO: 9433 - DNA, 21 bp, Homo sapiens
aacaaattcagcggctatcca

SEQ ID NO: 9434 - RNA, 21 nt, RNAi-sense strand
caaauucagcggcuauccauu

SEQ ID NO: 9435 - RNA, 21 nt, RNAi-antisense strand
uggauagccgcugaauuuguu

SEQ ID NO: 9436 - DNA, 21 bp, Homo sapiens
aaattcagcggctatccactg

SEQ ID NO: 9437 - RNA, 21 nt, RNAi-sense strand
auucagcggcuauccacuguu

SEQ ID NO: 9438 - RNA, 21 nt, RNAi-antisense strand
caguggauagccgcugaauuu

SEQ ID NO: 9439 - DNA, 21 bp, Homo sapiens
aattcagcggctatccactgt

SEQ ID NO: 9440 - RNA, 21 nt, RNAi-sense strand
uucagcggcuauccacuguuu

SEQ ID NO: 9441 - RNA, 21 nt, RNAi-antisense strand
acaguggauagccgcugaauu

SEQ ID NO: 9442 - DNA, 21 bp, Homo sapiens
aaacatatgagttggtggaaa

SEQ ID NO: 9443 - RNA, 21 nt, RNAi-sense strand
acauaugaguugguggaaauu

SEQ ID NO: 9444 - RNA, 21 nt, RNAi-antisense strand
uuuccaccaacucauauguuu

SEQ ID NO: 9445 - DNA, 21 bp, Homo sapiens
aaatatcacctcactgtggcc

SEQ ID NO: 9446 - RNA, 21 nt, RNAi-sense strand
auaucaccucacuguggccuu

SEQ ID NO: 9447 - RNA, 21 nt, RNAi-antisense strand
ggccacagugaggugauauuu

SEQ ID NO: 9448 - DNA, 21 bp, Homo sapiens
aaacatccacaggaaatgaag

SEQ ID NO: 9449 - RNA, 21 nt, RNAi-sense strand
acauccacaggaaaugaaguu

SEQ ID NO: 9450 - RNA, 21 nt, RNAi-antisense strand
cuucauuuccuguggauguuu

SEQ ID NO: 9451 - DNA, 21 bp, Homo sapiens
aacatccacaggaaatgaaga

SEQ ID NO: 9452 - RNA, 21 nt, RNAi-sense strand
cauccacaggaaaugaagauu

SEQ ID NO: 9453 - RNA, 21 nt, RNAi-antisense strand
ucuucauuuccuguggauguu

SEQ ID NO: 9454 - DNA, 21 bp, Homo sapiens
aatgaagacatacagtgtatc

SEQ ID NO: 9455 - RNA, 21 nt, RNAi-sense strand
ugaagacauacaguguaucuu

SEQ ID NO: 9456 - RNA, 21 nt, RNAi-antisense strand
gauacacuguaugucuucauu

SEQ ID NO: 9457 - DNA, 21 bp, Homo sapiens
aaattgcttccaagttcagtg

SEQ ID NO: 9458 - RNA, 21 nt, RNAi-sense strand
auugcuuccaaguucaguguu

SEQ ID NO: 9459 - RNA, 21 nt, RNAi-antisense strand
cacugaacuuggaagcaauuu

SEQ ID NO: 9460 - DNA, 21 bp, Homo sapiens
aattgcttccaagttcagtga

SEQ ID NO: 9461 - RNA, 21 nt, RNAi-sense strand
uugcuuccaaguucagugauu

SEQ ID NO: 9462 - RNA, 21 nt, RNAi-antisense strand
ucacugaacuuggaagcaauu

SEQ ID NO: 9463 - DNA, 21 bp, Homo sapiens
aagttcagtgagagactccag

SEQ ID NO: 9464 - RNA, 21 nt, RNAi-sense strand
guucagugagagacuccaguu

SEQ ID NO: 9465 - RNA, 21 nt, RNAi-antisense strand
cuggagucucucacugaacuu

SEQ ID NO: 9466 - DNA, 21 bp, Homo sapiens
aatgatcaactcatgtttctg

SEQ ID NO: 9467 - RNA, 21 nt, RNAi-sense strand
ugaucaacucauguuucuguu

SEQ ID NO: 9468 - RNA, 21 nt, RNAi-antisense strand
cagaaacaugaguugaucauu

SEQ ID NO: 9469 - DNA, 21 bp, Homo sapiens
aactcatgtttctggaaagag

SEQ ID NO: 9470 - RNA, 21 nt, RNAi-sense strand
cucauguuucuggaaagaguu

SEQ ID NO: 9471 - RNA, 21 nt, RNAi-antisense strand
cucuuuccagaaacaugaguu

SEQ ID NO: 9472 - DNA, 21 bp, Homo sapiens
aagcagccacaacaagtatgc

SEQ ID NO: 9473 - RNA, 21 nt, RNAi-sense strand
gcagccacaacaaguaugcuu

SEQ ID NO: 9474 - RNA, 21 nt, RNAi-antisense strand
gcauacuuguuguggcugcuu

SEQ ID NO: 9475 - DNA, 21 bp, Homo sapiens
aagtgaagagacagatttatg

SEQ ID NO: 9476 - RNA, 21 nt, RNAi-sense strand
gugaagagacagauuuauguu

SEQ ID NO: 9477 - RNA, 21 nt, RNAi-antisense strand
cauaaaucugucucuucacuu

SEQ ID NO: 9478 - DNA, 21 bp, Homo sapiens
aagagacagatttatgttgca

SEQ ID NO: 9479 - RNA, 21 nt, RNAi-sense strand
gagacagauuuauguugcauu

SEQ ID NO: 9480 - RNA, 21 nt, RNAi-antisense strand
ugcaacauaaaucugucucuu

SEQ ID NO: 9481 - DNA, 21 bp, Homo sapiens
aagtagcctaagaggattctt

SEQ ID NO: 9482 - RNA, 21 nt, RNAi-sense strand
guagccuaagaggauucuuuu

SEQ ID NO: 9483 - RNA, 21 nt, RNAi-antisense strand
aagaauccucuuaggcuacuu

SEQ ID NO: 9484 - DNA, 21 bp, Homo sapiens
aagaggattctttagagaatc

SEQ ID NO: 9485 - RNA, 21 nt, RNAi-sense strand
gaggauucuuuagagaaucuu

SEQ ID NO: 9486 - RNA, 21 nt, RNAi-antisense strand
gauucucuaaagaauccucuu

SEQ ID NO: 9487 - DNA, 21 bp, Homo sapiens
aatccgtattgaatttgtgtg

SEQ ID NO: 9488 - RNA, 21 nt, RNAi-sense strand
uccguauugaauuuguguguu

SEQ ID NO: 9489 - RNA, 21 nt, RNAi-antisense strand
cacacaaauucaauacggauu

SEQ ID NO: 9490 - DNA, 21 bp, Homo sapiens
aatttgtgtggtatgtcactc

SEQ ID NO: 9491 - RNA, 21 nt, RNAi-sense strand
uuugugugguaugucacucuu

SEQ ID NO: 9492 - RNA, 21 nt, RNAi-antisense strand
gagugacauaccacacaaauu

SEQ ID NO: 9493 - DNA, 21 bp, Homo sapiens
cagatgttgcctctctctctc

SEQ ID NO: 9494 - RNA, 21 nt, RNAi-sense strand
gauguugccucucucucucuu

SEQ ID NO: 9495 - RNA, 21 nt, RNAi-antisense strand
gagagagagaggcaacaucuu

SEQ ID NO: 9496 - DNA, 21 bp, Homo sapiens
cagtgcactctagaaacactg

SEQ ID NO: 9497 - RNA, 21 nt, RNAi-sense strand
gugcacucuagaaacacuguu

SEQ ID NO: 9498 - RNA, 21 nt, RNAi-antisense strand
caguguuucuagagugcacuu

SEQ ID NO: 9499 - DNA, 21 bp, Homo sapiens
cactctagaaacactgctgtg

SEQ ID NO: 9500 - RNA, 21 nt, RNAi-sense strand
cucuagaaacacugcuguguu

SEQ ID NO: 9501 - RNA, 21 nt, RNAi-antisense strand
cacagcaguguuucuagaguu

SEQ ID NO: 9502 - DNA, 21 bp, Homo sapiens
cactgctgtggtggagaaact

SEQ ID NO: 9503 - RNA, 21 nt, RNAi-sense strand
cugcugugguggagaaacuuu

SEQ ID NO: 9504 - RNA, 21 nt, RNAi-antisense strand
aguuucuccaccacagcaguu

SEQ ID NO: 9505 - DNA, 21 bp, Homo sapiens
caggtctggagcgaattccag

SEQ ID NO: 9506 - RNA, 21 nt, RNAi-sense strand
ggucuggagcgaauuccaguu

SEQ ID NO: 9507 - RNA, 21 nt, RNAi-antisense strand
cuggaauucgcuccagaccuu

SEQ ID NO: 9508 - DNA, 21 bp, Homo sapiens
cattagtgagattgagagaga

SEQ ID NO: 9509 - RNA, 21 nt, RNAi-sense strand
uuagugagauugagagagauu

SEQ ID NO: 9510 - RNA, 21 nt, RNAi-antisense strand
ucucucucaaucucacuaauu

SEQ ID NO: 9511 - DNA, 21 bp, Homo sapiens
cagtagagcagcagcacaggc

SEQ ID NO: 9512 - RNA, 21 nt, RNAi-sense strand
guagagcagcagcacaggcuu

SEQ ID NO: 9513 - RNA, 21 nt, RNAi-antisense strand
gccugugcugcugcucuacuu

SEQ ID NO: 9514 - DNA, 21 bp, Homo sapiens
cacgaaaccgactcggctgtg

SEQ ID NO: 9515 - RNA, 21 nt, RNAi-sense strand
cgaaaccgacucggcuguguu

SEQ ID NO: 9516 - RNA, 21 nt, RNAi-antisense strand
cacagccgagucgguuucguu

SEQ ID NO: 9517 - DNA, 21 bp, Homo sapiens
caatgaagctactaacattac

SEQ ID NO: 9518 - RNA, 21 nt, RNAi-sense strand
augaagcuacuaacauuacuu

SEQ ID NO: 9519 - RNA, 21 nt, RNAi-antisense strand
guaauguuaguagcuucauuu

SEQ ID NO: 9520 - DNA, 21 bp, Homo sapiens
cacagataccacatttagcag

SEQ ID NO: 9521 - RNA, 21 nt, RNAi-sense strand
cagauaccacauuuagcaguu

SEQ ID NO: 9522 - RNA, 21 nt, RNAi-antisense strand
cugcuaaaugugguaucuguu

SEQ ID NO: 9523 - DNA, 21 bp, Homo sapiens
cagataccacatttagcagga

SEQ ID NO: 9524 - RNA, 21 nt, RNAi-sense strand
gauaccacauuuagcaggauu

SEQ ID NO: 9525 - RNA, 21 nt, RNAi-antisense strand
uccugcuaaaugugguaucuu

SEQ ID NO: 9526 - DNA, 21 bp, Homo sapiens
cacatttagcaggaacagaac

SEQ ID NO: 9527 - RNA, 21 nt, RNAi-sense strand
cauuuagcaggaacagaacuu

SEQ ID NO: 9528 - RNA, 21 nt, RNAi-antisense strand
guucuguuccugcuaaauguu

SEQ ID NO: 9529 - DNA, 21 bp, Homo sapiens
catttagcaggaacagaacaa

SEQ ID NO: 9530 - RNA, 21 nt, RNAi-sense strand
uuuagcaggaacagaacaauu

SEQ ID NO: 9531 - RNA, 21 nt, RNAi-antisense strand
uuguucuguuccugcuaaauu

SEQ ID NO: 9532 - DNA, 21 bp, Homo sapiens
cagcttgcaaagcaaattcaa

SEQ ID NO: 9533 - RNA, 21 nt, RNAi-sense strand
gcuugcaaagcaaauucaauu

SEQ ID NO: 9534 - RNA, 21 nt, RNAi-antisense strand
uugaauuugcuuugcaagcuu

SEQ ID NO: 9535 - DNA, 21 bp, Homo sapiens
cagtggaaagaatttggcctg

SEQ ID NO: 9536 - RNA, 21 nt, RNAi-sense strand
guggaaagaauuuggccuguu

SEQ ID NO: 9537 - RNA, 21 nt, RNAi-antisense strand
caggccaaauucuuuccacuu

SEQ ID NO: 9538 - DNA, 21 bp, Homo sapiens
cacattatgatgtcctgttgt

SEQ ID NO: 9539 - RNA, 21 nt, RNAi-sense strand
cauuaugauguccuguuguuu

SEQ ID NO: 9540 - RNA, 21 nt, RNAi-antisense strand
acaacaggacaucauaauguu

SEQ ID NO: 9541 - DNA, 21 bp, Homo sapiens
cattatgatgtcctgttgtcc

SEQ ID NO: 9542 - RNA, 21 nt, RNAi-sense strand
uuaugauguccuguuguccuu

SEQ ID NO: 9543 - RNA, 21 nt, RNAi-antisense strand
ggacaacaggacaucauaauu

SEQ ID NO: 9544 - DNA, 21 bp, Homo sapiens
caacacatcattatttgaacc

SEQ ID NO: 9545 - RNA, 21 nt, RNAi-sense strand
acacaucauuauuugaaccuu

SEQ ID NO: 9546 - RNA, 21 nt, RNAi-antisense strand
gguucaaauaaugauguguuu

SEQ ID NO: 9547 - DNA, 21 bp, Homo sapiens
cacatcattatttgaaccacc

SEQ ID NO: 9548 - RNA, 21 nt, RNAi-sense strand
caucauuauuugaaccaccuu

SEQ ID NO: 9549 - RNA, 21 nt, RNAi-antisense strand
ggugguucaaauaaugauguu

SEQ ID NO: 9550 - DNA, 21 bp, Homo sapiens
catcattatttgaaccacctc

SEQ ID NO: 9551 - RNA, 21 nt, RNAi-sense strand
ucauuauuugaaccaccucuu

SEQ ID NO: 9552 - RNA, 21 nt, RNAi-antisense strand
gaggugguucaaauaaugauu

SEQ ID NO: 9553 - DNA, 21 bp, Homo sapiens
cattatttgaaccacctcctc

SEQ ID NO: 9554 - RNA, 21 nt, RNAi-sense strand
uuauuugaaccaccuccucuu

SEQ ID NO: 9555 - RNA, 21 nt, RNAi-antisense strand
gaggaggugguucaaauaauu

SEQ ID NO: 9556 - DNA, 21 bp, Homo sapiens
cacctcctccaggatatgaaa

SEQ ID NO: 9557 - RNA, 21 nt, RNAi-sense strand
ccuccuccaggauaugaaauu

SEQ ID NO: 9558 - RNA, 21 nt, RNAi-antisense strand
uuucauauccuggaggagguu

SEQ ID NO: 9559 - DNA, 21 bp, Homo sapiens
cacctttcagtgctttctctc

SEQ ID NO: 9560 - RNA, 21 nt, RNAi-sense strand
ccuuucagugcuuucucucuu

SEQ ID NO: 9561 - RNA, 21 nt, RNAi-antisense strand
gagagaaagcacugaaagguu

SEQ ID NO: 9562 - DNA, 21 bp, Homo sapiens
cagtgctttctctcctcaagg

SEQ ID NO: 9563 - RNA, 21 nt, RNAi-sense strand
gugcuuucucuccucaagguu

SEQ ID NO: 9564 - RNA, 21 nt, RNAi-antisense strand
ccuugaggagagaaagcacuu

SEQ ID NO: 9565 - DNA, 21 bp, Homo sapiens
cacgaactgaagacttcttta

SEQ ID NO: 9566 - RNA, 21 nt, RNAi-sense strand
cgaacugaagacuucuuuauu

SEQ ID NO: 9567 - RNA, 21 nt, RNAi-antisense strand
uaaagaagucuucaguucguu

SEQ ID NO: 9568 - DNA, 21 bp, Homo sapiens
caaaggagtcattctctactc

SEQ ID NO: 9569 - RNA, 21 nt, RNAi-sense strand
aaggagucauucucuacucuu

SEQ ID NO: 9570 - RNA, 21 nt, RNAi-antisense strand
gaguagagaaugacuccuuuu

SEQ ID NO: 9571 - DNA, 21 bp, Homo sapiens
cagatggttggaatcttcctg

SEQ ID NO: 9572 - RNA, 21 nt, RNAi-sense strand
gaugguuggaaucuuccuguu

SEQ ID NO: 9573 - RNA, 21 nt, RNAi-antisense strand
caggaagauuccaaccaucuu

SEQ ID NO: 9574 - DNA, 21 bp, Homo sapiens
cagcgtggaaatatcctaaat

SEQ ID NO: 9575 - RNA, 21 nt, RNAi-sense strand
gcguggaaauauccuaaauuu

SEQ ID NO: 9576 - RNA, 21 nt, RNAi-antisense strand
auuuaggauauuuccacgcuu

SEQ ID NO: 9577 - DNA, 21 bp, Homo sapiens
caaatgaatatgcttataggc

SEQ ID NO: 9578 - RNA, 21 nt, RNAi-sense strand
aaugaauaugcuuauaggcuu

SEQ ID NO: 9579 - RNA, 21 nt, RNAi-antisense strand
gccuauaagcauauucauuuu

SEQ ID NO: 9580 - DNA, 21 bp, Homo sapiens
cagaggctgttggtcttccaa

SEQ ID NO: 9581 - RNA, 21 nt, RNAi-sense strand
gaggcuguuggucuuccaauu

SEQ ID NO: 9582 - RNA, 21 nt, RNAi-antisense strand
uuggaagaccaacagccucuu

SEQ ID NO: 9583 - DNA, 21 bp, Homo sapiens
caagtattcctgttcatccaa

SEQ ID NO: 9584 - RNA, 21 nt, RNAi-sense strand
aguauuccuguucauccaauu

SEQ ID NO: 9585 - RNA, 21 nt, RNAi-antisense strand
uuggaugaacaggaauacuuu

SEQ ID NO: 9586 - DNA, 21 bp, Homo sapiens
catccaattggatactatgat

SEQ ID NO: 9587 - RNA, 21 nt, RNAi-sense strand
uccaauuggauacuaugauuu

SEQ ID NO: 9588 - RNA, 21 nt, RNAi-antisense strand
aucauaguauccaauuggauu

SEQ ID NO: 9589 - DNA, 21 bp, Homo sapiens
caattggatactatgatgcac

SEQ ID NO: 9590 - RNA, 21 nt, RNAi-sense strand
auuggauacuaugaugcacuu

SEQ ID NO: 9591 - RNA, 21 nt, RNAi-antisense strand
gugcaucauaguauccaauuu

SEQ ID NO: 9592 - DNA, 21 bp, Homo sapiens
cagcaccaccagatagcagct

SEQ ID NO: 9593 - RNA, 21 nt, RNAi-sense strand
gcaccaccagauagcagcuuu

SEQ ID NO: 9594 - RNA, 21 nt, RNAi-antisense strand
agcugcuaucugguggugcuu

SEQ ID NO: 9595 - DNA, 21 bp, Homo sapiens
caccaccagatagcagctgga

SEQ ID NO: 9596 - RNA, 21 nt, RNAi-sense strand
ccaccagauagcagcuggauu

SEQ ID NO: 9597 - RNA, 21 nt, RNAi-antisense strand
uccagcugcuaucuggugguu

SEQ ID NO: 9598 - DNA, 21 bp, Homo sapiens
caccagatagcagctggagag

SEQ ID NO: 9599 - RNA, 21 nt, RNAi-sense strand
ccagauagcagcuggagaguu

SEQ ID NO: 9600 - RNA, 21 nt, RNAi-antisense strand
cucuccagcugcuaucugguu

SEQ ID NO: 9601 - DNA, 21 bp, Homo sapiens
cagatagcagctggagaggaa

SEQ ID NO: 9602 - RNA, 21 nt, RNAi-sense strand
gauagcagcuggagaggaauu

SEQ ID NO: 9603 - RNA, 21 nt, RNAi-antisense strand
uuccucuccagcugcuaucuu

SEQ ID NO: 9604 - DNA, 21 bp, Homo sapiens
cagctggagaggaagtctcaa

SEQ ID NO: 9605 - RNA, 21 nt, RNAi-sense strand
gcuggagaggaagucucaauu

SEQ ID NO: 9606 - RNA, 21 nt, RNAi-antisense strand
uugagacuuccucuccagcuu

SEQ ID NO: 9607 - DNA, 21 bp, Homo sapiens
caatgttggacctggctttac

SEQ ID NO: 9608 - RNA, 21 nt, RNAi-sense strand
auguuggaccuggcuuuacuu

SEQ ID NO: 9609 - RNA, 21 nt, RNAi-antisense strand
guaaagccagguccaacauuu

SEQ ID NO: 9610 - DNA, 21 bp, Homo sapiens
caagatgcacatccactctac

SEQ ID NO: 9611 - RNA, 21 nt, RNAi-sense strand
agaugcacauccacucuacuu

SEQ ID NO: 9612 - RNA, 21 nt, RNAi-antisense strand
guagaguggaugugcaucuuu

SEQ ID NO: 9613 - DNA, 21 bp, Homo sapiens
cacatccactctaccaatgaa

SEQ ID NO: 9614 - RNA, 21 nt, RNAi-sense strand
cauccacucuaccaaugaauu

SEQ ID NO: 9615 - RNA, 21 nt, RNAi-antisense strand
uucauugguagaguggauguu

SEQ ID NO: 9616 - DNA, 21 bp, Homo sapiens
catccactctaccaatgaagt

SEQ ID NO: 9617 - RNA, 21 nt, RNAi-sense strand
uccacucuaccaaugaaguuu

SEQ ID NO: 9618 - RNA, 21 nt, RNAi-antisense strand
acuucauugguagaguggauu

SEQ ID NO: 9619 - DNA, 21 bp, Homo sapiens
cactctaccaatgaagtgaca

SEQ ID NO: 9620 - RNA, 21 nt, RNAi-sense strand
cucuaccaaugaagugacauu

SEQ ID NO: 9621 - RNA, 21 nt, RNAi-antisense strand
ugucacuucauugguagaguu

SEQ ID NO: 9622 - DNA, 21 bp, Homo sapiens
caatgtgataggtactctcag

SEQ ID NO: 9623 - RNA, 21 nt, RNAi-sense strand
augugauagguacucucaguu

SEQ ID NO: 9624 - RNA, 21 nt, RNAi-antisense strand
cugagaguaccuaucacauuu

SEQ ID NO: 9625 - DNA, 21 bp, Homo sapiens
cagaggagcagtggaaccaga

SEQ ID NO: 9626 - RNA, 21 nt, RNAi-sense strand
gaggagcaguggaaccagauu

SEQ ID NO: 9627 - RNA, 21 nt, RNAi-antisense strand
ucugguuccacugcuccucuu

SEQ ID NO: 9628 - DNA, 21 bp, Homo sapiens
cagtggaaccagacagatatg

SEQ ID NO: 9629 - RNA, 21 nt, RNAi-sense strand
guggaaccagacagauauguu

SEQ ID NO: 9630 - RNA, 21 nt, RNAi-antisense strand
cauaucugucugguuccacuu

SEQ ID NO: 9631 - DNA, 21 bp, Homo sapiens
cagacagatatgtcattctgg

SEQ ID NO: 9632 - RNA, 21 nt, RNAi-sense strand
gacagauaugucauucugguu

SEQ ID NO: 9633 - RNA, 21 nt, RNAi-antisense strand
ccagaaugacauaucugucuu

SEQ ID NO: 9634 - DNA, 21 bp, Homo sapiens
cagagtggagcagctgttgtt

SEQ ID NO: 9635 - RNA, 21 nt, RNAi-sense strand
gaguggagcagcuguuguuuu

SEQ ID NO: 9636 - RNA, 21 nt, RNAi-antisense strand
aacaacagcugcuccacucuu

SEQ ID NO: 9637 - DNA, 21 bp, Homo sapiens
cagctgttgttcatgaaattg

SEQ ID NO: 9638 - RNA, 21 nt, RNAi-sense strand
gcuguuguucaugaaauuguu

SEQ ID NO: 9639 - RNA, 21 nt, RNAi-antisense strand
caauuucaugaacaacagcuu

SEQ ID NO: 9640 - DNA, 21 bp, Homo sapiens
catgaaattgtgaggagcttt

SEQ ID NO: 9641 - RNA, 21 nt, RNAi-sense strand
ugaaauugugaggagcuuuuu

SEQ ID NO: 9642 - RNA, 21 nt, RNAi-antisense strand
aaagcuccucacaauuucauu

SEQ ID NO: 9643 - DNA, 21 bp, Homo sapiens
cagaagaatttggtcttcttg

SEQ ID NO: 9644 - RNA, 21 nt, RNAi-sense strand
gaagaauuuggucuucuuguu

SEQ ID NO: 9645 - RNA, 21 nt, RNAi-antisense strand
caagaagaccaaauucuucuu

SEQ ID NO: 9646 - DNA, 21 bp, Homo sapiens
cagaggagaattcaagactcc

SEQ ID NO: 9647 - RNA, 21 nt, RNAi-sense strand
gaggagaauucaagacuccuu

SEQ ID NO: 9648 - RNA, 21 nt, RNAi-antisense strand
ggagucuugaauucuccucuu

SEQ ID NO: 9649 - DNA, 21 bp, Homo sapiens
caagactccttcaagagcgtg

SEQ ID NO: 9650 - RNA, 21 nt, RNAi-sense strand
agacuccuucaagagcguguu

SEQ ID NO: 9651 - RNA, 21 nt, RNAi-antisense strand
cacgcucuugaaggagucuuu

SEQ ID NO: 9652 - DNA, 21 bp, Homo sapiens
caagagcgtggcgtggcttat

SEQ ID NO: 9653 - RNA, 21 nt, RNAi-sense strand
agagcguggcguggcuuauuu

SEQ ID NO: 9654 - RNA, 21 nt, RNAi-antisense strand
auaagccacgccacgcucuuu

SEQ ID NO: 9655 - DNA, 21 bp, Homo sapiens
catctatagaaggaaactaca

SEQ ID NO: 9656 - RNA, 21 nt, RNAi-sense strand
ucuauagaaggaaacuacauu

SEQ ID NO: 9657 - RNA, 21 nt, RNAi-antisense strand
uguaguuuccuucuauagauu

SEQ ID NO: 9658 - DNA, 21 bp, Homo sapiens
cactctgagagttgattgtac

SEQ ID NO: 9659 - RNA, 21 nt, RNAi-sense strand
cucugagaguugauuguacuu

SEQ ID NO: 9660 - RNA, 21 nt, RNAi-antisense strand
guacaaucaacucucagaguu

SEQ ID NO: 9661 - DNA, 21 bp, Homo sapiens
caccgctgatgtacagcttgg

SEQ ID NO: 9662 - RNA, 21 nt, RNAi-sense strand
ccgcugauguacagcuugguu

SEQ ID NO: 9663 - RNA, 21 nt, RNAi-antisense strand
ccaagcuguacaucagcgguu

SEQ ID NO: 9664 - DNA, 21 bp, Homo sapiens
cagcttggtacacaacctaac

SEQ ID NO: 9665 - RNA, 21 nt, RNAi-sense strand
gcuugguacacaaccuaacuu

SEQ ID NO: 9666 - RNA, 21 nt, RNAi-antisense strand
guuagguuguguaccaagcuu

SEQ ID NO: 9667 - DNA, 21 bp, Homo sapiens
caacgacttggaattgcttca

SEQ ID NO: 9668 - RNA, 21 nt, RNAi-sense strand
acgacuuggaauugcuucauu

SEQ ID NO: 9669 - RNA, 21 nt, RNAi-antisense strand
ugaagcaauuccaagucguuu

SEQ ID NO: 9670 - DNA, 21 bp, Homo sapiens
caggcagagcacggtatacta

SEQ ID NO: 9671 - RNA, 21 nt, RNAi-sense strand
ggcagagcacgguauacuauu

SEQ ID NO: 9672 - RNA, 21 nt, RNAi-antisense strand
uaguauaccgugcucugccuu

SEQ ID NO: 9673 - DNA, 21 bp, Homo sapiens
caaacaaattcagcggctatc

SEQ ID NO: 9674 - RNA, 21 nt, RNAi-sense strand
aacaaauucagcggcuaucuu

SEQ ID NO: 9675 - RNA, 21 nt, RNAi-antisense strand
gauagccgcugaauuuguuuu

SEQ ID NO: 9676 - DNA, 21 bp, Homo sapiens
caaattcagcggctatccact

SEQ ID NO: 9677 - RNA, 21 nt, RNAi-sense strand
aauucagcggcuauccacuuu

SEQ ID NO: 9678 - RNA, 21 nt, RNAi-antisense strand
aguggauagccgcugaauuuu

SEQ ID NO: 9679 - DNA, 21 bp, Homo sapiens
cagcggctatccactgtatca

SEQ ID NO: 9680 - RNA, 21 nt, RNAi-sense strand
gcggcuauccacuguaucauu

SEQ ID NO: 9681 - RNA, 21 nt, RNAi-antisense strand
ugauacaguggauagccgcuu

SEQ ID NO: 9682 - DNA, 21 bp, Homo sapiens
cactgtatcacagtgtctatg

SEQ ID NO: 9683 - RNA, 21 nt, RNAi-sense strand
cuguaucacagugucuauguu

SEQ ID NO: 9684 - RNA, 21 nt, RNAi-antisense strand
cauagacacugugauacaguu

SEQ ID NO: 9685 - DNA, 21 bp, Homo sapiens
cacagtgtctatgaaacatat

SEQ ID NO: 9686 - RNA, 21 nt, RNAi-sense strand
cagugucuaugaaacauauuu

SEQ ID NO: 9687 - RNA, 21 nt, RNAi-antisense strand
auauguuucauagacacuguu

SEQ ID NO: 9688 - DNA, 21 bp, Homo sapiens
cagtgtctatgaaacatatga

SEQ ID NO: 9689 - RNA, 21 nt, RNAi-sense strand
gugucuaugaaacauaugauu

SEQ ID NO: 9690 - RNA, 21 nt, RNAi-antisense strand
ucauauguuucauagacacuu

SEQ ID NO: 9691 - DNA, 21 bp, Homo sapiens
cagtatttctatgaaacatcc

SEQ ID NO: 9692 - RNA, 21 nt, RNAi-sense strand
guauuucuaugaaacauccuu

SEQ ID NO: 9693 - RNA, 21 nt, RNAi-antisense strand
ggauguuucauagaaauacuu

SEQ ID NO: 9694 - DNA, 21 bp, Homo sapiens
catccacaggaaatgaagaca

SEQ ID NO: 9695 - RNA, 21 nt, RNAi-sense strand
uccacaggaaaugaagacauu

SEQ ID NO: 9696 - RNA, 21 nt, RNAi-antisense strand
ugucuucauuuccuguggauu

SEQ ID NO: 9697 - DNA, 21 bp, Homo sapiens
cacaggaaatgaagacataca

SEQ ID NO: 9698 - RNA, 21 nt, RNAi-sense strand
caggaaaugaagacauacauu

SEQ ID NO: 9699 - RNA, 21 nt, RNAi-antisense strand
uguaugucuucauuuccuguu

SEQ ID NO: 9700 - DNA, 21 bp, Homo sapiens
caggaaatgaagacatacagt

SEQ ID NO: 9701 - RNA, 21 nt, RNAi-sense strand
ggaaaugaagacauacaguuu

SEQ ID NO: 9702 - RNA, 21 nt, RNAi-antisense strand
acuguaugucuucauuuccuu

SEQ ID NO: 9703 - DNA, 21 bp, Homo sapiens
cagtgtatcatttgattcact

SEQ ID NO: 9704 - RNA, 21 nt, RNAi-sense strand
guguaucauuugauucacuuu

SEQ ID NO: 9705 - RNA, 21 nt, RNAi-antisense strand
agugaaucaaaugauacacuu

SEQ ID NO: 9706 - DNA, 21 bp, Homo sapiens
cagaaattgcttccaagttca

SEQ ID NO: 9707 - RNA, 21 nt, RNAi-sense strand
gaaauugcuuccaaguucauu

SEQ ID NO: 9708 - RNA, 21 nt, RNAi-antisense strand
ugaacuuggaagcaauuucuu

SEQ ID NO: 9709 - DNA, 21 bp, Homo sapiens
caagttcagtgagagactcca

SEQ ID NO: 9710 - RNA, 21 nt, RNAi-sense strand
aguucagugagagacuccauu

SEQ ID NO: 9711 - RNA, 21 nt, RNAi-antisense strand
uggagucucucacugaacuuu

SEQ ID NO: 9712 - DNA, 21 bp, Homo sapiens
cagtgagagactccaggactt

SEQ ID NO: 9713 - RNA, 21 nt, RNAi-sense strand
gugagagacuccaggacuuuu

SEQ ID NO: 9714 - RNA, 21 nt, RNAi-antisense strand
aaguccuggagucucucacuu

SEQ ID NO: 9715 - DNA, 21 bp, Homo sapiens
caactcatgtttctggaaaga

SEQ ID NO: 9716 - RNA, 21 nt, RNAi-sense strand
acucauguuucuggaaagauu

SEQ ID NO: 9717 - RNA, 21 nt, RNAi-antisense strand
ucuuuccagaaacaugaguuu

SEQ ID NO: 9718 - DNA, 21 bp, Homo sapiens
catgtttctggaaagagcatt

SEQ ID NO: 9719 - RNA, 21 nt, RNAi-sense strand
uguuucuggaaagagcauuuu

SEQ ID NO: 9720 - RNA, 21 nt, RNAi-antisense strand
aaugcucuuuccagaaacauu

SEQ ID NO: 9721 - DNA, 21 bp, Homo sapiens
catgtcatctatgctccaagc

SEQ ID NO: 9722 - RNA, 21 nt, RNAi-sense strand
ugucaucuaugcuccaagcuu

SEQ ID NO: 9723 - RNA, 21 nt, RNAi-antisense strand
gcuuggagcauagaugacauu

SEQ ID NO: 9724 - DNA, 21 bp, Homo sapiens
catctatgctccaagcagcca

SEQ ID NO: 9725 - RNA, 21 nt, RNAi-sense strand
ucuaugcuccaagcagccauu

SEQ ID NO: 9726 - RNA, 21 nt, RNAi-antisense strand
uggcugcuuggagcauagauu

SEQ ID NO: 9727 - DNA, 21 bp, Homo sapiens
caagcagccacaacaagtatg

SEQ ID NO: 9728 - RNA, 21 nt, RNAi-sense strand
agcagccacaacaaguauguu

SEQ ID NO: 9729 - RNA, 21 nt, RNAi-antisense strand
cauacuuguuguggcugcuuu

SEQ ID NO: 9730 - DNA, 21 bp, Homo sapiens
cagccacaacaagtatgcagg

SEQ ID NO: 9731 - RNA, 21 nt, RNAi-sense strand
gccacaacaaguaugcagguu

SEQ ID NO: 9732 - RNA, 21 nt, RNAi-antisense strand
ccugcauacuuguuguggcuu

SEQ ID NO: 9733 - DNA, 21 bp, Homo sapiens
caggaatttatgatgctctgt

SEQ ID NO: 9734 - RNA, 21 nt, RNAi-sense strand
ggaauuuaugaugcucuguuu

SEQ ID NO: 9735 - RNA, 21 nt, RNAi-antisense strand
acagagcaucauaaauuccuu

SEQ ID NO: 9736 - DNA, 21 bp, Homo sapiens
cagatttatgttgcagccttc

SEQ ID NO: 9737 - RNA, 21 nt, RNAi-sense strand
gauuuauguugcagccuucuu

SEQ ID NO: 9738 - RNA, 21 nt, RNAi-antisense strand
gaaggcugcaacauaaaucuu

SEQ ID NO: 9739 - DNA, 21 bp, Homo sapiens
cagccttcacagtgcaggcag

SEQ ID NO: 9740 - RNA, 21 nt, RNAi-sense strand
gccuucacagugcaggcaguu

SEQ ID NO: 9741 - RNA, 21 nt, RNAi-antisense strand
cugccugcacugugaaggcuu

SEQ ID NO: 9742 - DNA, 21 bp, Homo sapiens
cacagtgcaggcagctgcaga

SEQ ID NO: 9743 - RNA, 21 nt, RNAi-sense strand
cagugcaggcagcugcagauu

SEQ ID NO: 9744 - RNA, 21 nt, RNAi-antisense strand
ucugcagcugccugcacuguu

SEQ ID NO: 9745 - DNA, 21 bp, Homo sapiens
cagtgcaggcagctgcagaga

SEQ ID NO: 9746 - RNA, 21 nt, RNAi-sense strand
gugcaggcagcugcagagauu

SEQ ID NO: 9747 - RNA, 21 nt, RNAi-antisense strand
ucucugcagcugccugcacuu

SEQ ID NO: 9748 - DNA, 21 bp, Homo sapiens
caggcagctgcagagactttg

SEQ ID NO: 9749 - RNA, 21 nt, RNAi-sense strand
ggcagcugcagagacuuuguu

SEQ ID NO: 9750 - RNA, 21 nt, RNAi-antisense strand
caaagucucugcagcugccuu

SEQ ID NO: 9751 - DNA, 21 bp, Homo sapiens
cagctgcagagactttgagtg

SEQ ID NO: 9752 - RNA, 21 nt, RNAi-sense strand
gcugcagagacuuugaguguu

SEQ ID NO: 9753 - RNA, 21 nt, RNAi-antisense strand
cacucaaagucucugcagcuu

SEQ ID NO: 9754 - DNA, 21 bp, Homo sapiens
cagagactttgagtgaagtag

SEQ ID NO: 9755 - RNA, 21 nt, RNAi-sense strand
gagacuuugagugaaguaguu

SEQ ID NO: 9756 - RNA, 21 nt, RNAi-antisense strand
cuacuucacucaaagucucuu

SEQ ID NO: 9757 - DNA, 21 bp, Homo sapiens
cactcagaaagaatcgtaatg

SEQ ID NO: 9758 - RNA, 21 nt, RNAi-sense strand
cucagaaagaaucguaauguu

SEQ ID NO: 9759 - RNA, 21 nt, RNAi-antisense strand
cauuacgauucuuucugaguu

SEQ ID NO: 9760 - DNA, 21 bp, Homo sapiens
gatttccttctcctggaggca

SEQ ID NO: 9761 - RNA, 21 nt, RNAi-sense strand
uuuccuucuccuggaggcauu

SEQ ID NO: 9762 - RNA, 21 nt, RNAi-antisense strand
ugccuccaggagaaggaaauu

SEQ ID NO: 9763 - DNA, 21 bp, Homo sapiens
gaggcagatgttgcctctctc

SEQ ID NO: 9764 - RNA, 21 nt, RNAi-sense strand
ggcagauguugccucucucuu

SEQ ID NO: 9765 - RNA, 21 nt, RNAi-antisense strand
gagagaggcaacaucugccuu

SEQ ID NO: 9766 - DNA, 21 bp, Homo sapiens
gatgttgcctctctctctcgc

SEQ ID NO: 9767 - RNA, 21 nt, RNAi-sense strand
uguugccucucucucucgcuu

SEQ ID NO: 9768 - RNA, 21 nt, RNAi-antisense strand
gcgagagagagaggcaacauu

SEQ ID NO: 9769 - DNA, 21 bp, Homo sapiens
gattggttcagtgcactctag

SEQ ID NO: 9770 - RNA, 21 nt, RNAi-sense strand
uugguucagugcacucuaguu

SEQ ID NO: 9771 - RNA, 21 nt, RNAi-antisense strand
cuagagugcacugaaccaauu

SEQ ID NO: 9772 - DNA, 21 bp, Homo sapiens
gaaacactgctgtggtggaga

SEQ ID NO: 9773 - RNA, 21 nt, RNAi-sense strand
aacacugcugugguggagauu

SEQ ID NO: 9774 - RNA, 21 nt, RNAi-antisense strand
ucuccaccacagcaguguuuu

SEQ ID NO: 9775 - DNA, 21 bp, Homo sapiens
gagcgaattccagcctgcagg

SEQ ID NO: 9776 - RNA, 21 nt, RNAi-sense strand
gcgaauuccagccugcagguu

SEQ ID NO: 9777 - RNA, 21 nt, RNAi-antisense strand
ccugcaggcuggaauucgcuu

SEQ ID NO: 9778 - DNA, 21 bp, Homo sapiens
gataagcgaggcattagtgag

SEQ ID NO: 9779 - RNA, 21 nt, RNAi-sense strand
uaagcgaggcauuagugaguu

SEQ ID NO: 9780 - RNA, 21 nt, RNAi-antisense strand
cucacuaaugccucgcuuauu

SEQ ID NO: 9781 - DNA, 21 bp, Homo sapiens
gaggcattagtgagattgaga

SEQ ID NO: 9782 - RNA, 21 nt, RNAi-sense strand
ggcauuagugagauugagauu

SEQ ID NO: 9783 - RNA, 21 nt, RNAi-antisense strand
ucucaaucucacuaaugccuu

SEQ ID NO: 9784 - DNA, 21 bp, Homo sapiens
gagattgagagagactttacc

SEQ ID NO: 9785 - RNA, 21 nt, RNAi-sense strand
gauugagagagacuuuaccuu

SEQ ID NO: 9786 - RNA, 21 nt, RNAi-antisense strand
gguaaagucucucucaaucuu

SEQ ID NO: 9787 - DNA, 21 bp, Homo sapiens
gagatgtggaatctccttcac

SEQ ID NO: 9788 - RNA, 21 nt, RNAi-sense strand
gauguggaaucuccuucacuu

SEQ ID NO: 9789 - RNA, 21 nt, RNAi-antisense strand
gugaaggagauuccacaucuu

SEQ ID NO: 9790 - DNA, 21 bp, Homo sapiens
gatgtggaatctccttcacga

SEQ ID NO: 9791 - RNA, 21 nt, RNAi-sense strand
uguggaaucuccuucacgauu

SEQ ID NO: 9792 - RNA, 21 nt, RNAi-antisense strand
ucgugaaggagauuccacauu

SEQ ID NO: 9793 - DNA, 21 bp, Homo sapiens
gaatctccttcacgaaaccga

SEQ ID NO: 9794 - RNA, 21 nt, RNAi-sense strand
aucuccuucacgaaaccgauu

SEQ ID NO: 9795 - RNA, 21 nt, RNAi-antisense strand
ucgguuucgugaaggagauuu

SEQ ID NO: 9796 - DNA, 21 bp, Homo sapiens
gaagctactaacattactcca

SEQ ID NO: 9797 - RNA, 21 nt, RNAi-sense strand
agcuacuaacauuacuccauu

SEQ ID NO: 9798 - RNA, 21 nt, RNAi-antisense strand
uggaguaauguuaguagcuuu

SEQ ID NO: 9799 - DNA, 21 bp, Homo sapiens
gatgaattgaaagctgagaac

SEQ ID NO: 9800 - RNA, 21 nt, RNAi-sense strand
ugaauugaaagcugagaacuu

SEQ ID NO: 9801 - RNA, 21 nt, RNAi-antisense strand
guucucagcuuucaauucauu

SEQ ID NO: 9802 - DNA, 21 bp, Homo sapiens
gaattgaaagctgagaacatc

SEQ ID NO: 9803 - RNA, 21 nt, RNAi-sense strand
auugaaagcugagaacaucuu

SEQ ID NO: 9804 - RNA, 21 nt, RNAi-antisense strand
gauguucucagcuuucaauuu

SEQ ID NO: 9805 - DNA, 21 bp, Homo sapiens
gaaagctgagaacatcaagaa

SEQ ID NO: 9806 - RNA, 21 nt, RNAi-sense strand
aagcugagaacaucaagaauu

SEQ ID NO: 9807 - RNA, 21 nt, RNAi-antisense strand
uucuugauguucucagcuuuu

SEQ ID NO: 9808 - DNA, 21 bp, Homo sapiens
gagaacatcaagaagttctta

SEQ ID NO: 9809 - RNA, 21 nt, RNAi-sense strand
gaacaucaagaaguucuuauu

SEQ ID NO: 9810 - RNA, 21 nt, RNAi-antisense strand
uaagaacuucuugauguucuu

SEQ ID NO: 9811 - DNA, 21 bp, Homo sapiens
gataccacatttagcaggaac

SEQ ID NO: 9812 - RNA, 21 nt, RNAi-sense strand
uaccacauuuagcaggaacuu

SEQ ID NO: 9813 - RNA, 21 nt, RNAi-antisense strand
guuccugcuaaaugugguauu

SEQ ID NO: 9814 - DNA, 21 bp, Homo sapiens
gaaagaatttggcctggattc

SEQ ID NO: 9815 - RNA, 21 nt, RNAi-sense strand
aagaauuuggccuggauucuu

SEQ ID NO: 9816 - RNA, 21 nt, RNAi-antisense strand
gaauccaggccaaauucuuuu

SEQ ID NO: 9817 - DNA, 21 bp, Homo sapiens
gaatttggcctggattctgtt

SEQ ID NO: 9818 - RNA, 21 nt, RNAi-sense strand
auuuggccuggauucuguuuu

SEQ ID NO: 9819 - RNA, 21 nt, RNAi-antisense strand
aacagaauccaggccaaauuu

SEQ ID NO: 9820 - DNA, 21 bp, Homo sapiens
gattctgttgagctagcacat

SEQ ID NO: 9821 - RNA, 21 nt, RNAi-sense strand
uucuguugagcuagcacauuu

SEQ ID NO: 9822 - RNA, 21 nt, RNAi-antisense strand
augugcuagcucaacagaauu

SEQ ID NO: 9823 - DNA, 21 bp, Homo sapiens
gagctagcacattatgatgtc

SEQ ID NO: 9824 - RNA, 21 nt, RNAi-sense strand
gcuagcacauuaugaugucuu

SEQ ID NO: 9825 - RNA, 21 nt, RNAi-antisense strand
gacaucauaaugugcuagcuu

SEQ ID NO: 9826 - DNA, 21 bp, Homo sapiens
gaaccacctcctccaggatat

SEQ ID NO: 9827 - RNA, 21 nt, RNAi-sense strand
accaccuccuccaggauauuu

SEQ ID NO: 9828 - RNA, 21 nt, RNAi-antisense strand
auauccuggaggaggugguuu

SEQ ID NO: 9829 - DNA, 21 bp, Homo sapiens
gatattgtaccacctttcagt

SEQ ID NO: 9830 - RNA, 21 nt, RNAi-sense strand
uauuguaccaccuuucaguuu

SEQ ID NO: 9831 - RNA, 21 nt, RNAi-antisense strand
acugaaaggugguacaauauu

SEQ ID NO: 9832 - DNA, 21 bp, Homo sapiens
gacttctttaaattggaacgg

SEQ ID NO: 9833 - RNA, 21 nt, RNAi-sense strand
cuucuuuaaauuggaacgguu

SEQ ID NO: 9834 - RNA, 21 nt, RNAi-antisense strand
ccguuccaauuuaaagaaguu

SEQ ID NO: 9835 - DNA, 21 bp, Homo sapiens
gagtcattctctactccgacc

SEQ ID NO: 9836 - RNA, 21 nt, RNAi-sense strand
gucauucucuacuccgaccuu

SEQ ID NO: 9837 - RNA, 21 nt, RNAi-antisense strand
ggucggaguagagaaugacuu

SEQ ID NO: 9838 - DNA, 21 bp, Homo sapiens
gaagtcctatccagatggttg

SEQ ID NO: 9839 - RNA, 21 nt, RNAi-sense strand
aguccuauccagaugguuguu

SEQ ID NO: 9840 - RNA, 21 nt, RNAi-antisense strand
caaccaucuggauaggacuuu

SEQ ID NO: 9841 - DNA, 21 bp, Homo sapiens
gatggttggaatcttcctgga

SEQ ID NO: 9842 - RNA, 21 nt, RNAi-sense strand
ugguuggaaucuuccuggauu

SEQ ID NO: 9843 - RNA, 21 nt, RNAi-antisense strand
uccaggaagauuccaaccauu

SEQ ID NO: 9844 - DNA, 21 bp, Homo sapiens
gaatcttcctggaggtggtgt

SEQ ID NO: 9845 - RNA, 21 nt, RNAi-sense strand
aucuuccuggaggugguguuu

SEQ ID NO: 9846 - RNA, 21 nt, RNAi-antisense strand
acaccaccuccaggaagauuu

SEQ ID NO: 9847 - DNA, 21 bp, Homo sapiens
gaggtggtgtccagcgtggaa

SEQ ID NO: 9848 - RNA, 21 nt, RNAi-sense strand
ggugguguccagcguggaauu

SEQ ID NO: 9849 - RNA, 21 nt, RNAi-antisense strand
uuccacgcuggacaccaccuu

SEQ ID NO: 9850 - DNA, 21 bp, Homo sapiens
gaatatgcttataggcgtgga

SEQ ID NO: 9851 - RNA, 21 nt, RNAi-sense strand
auaugcuuauaggcguggauu

SEQ ID NO: 9852 - RNA, 21 nt, RNAi-antisense strand
uccacgccuauaagcauauuu

SEQ ID NO: 9853 - DNA, 21 bp, Homo sapiens
gaattgcagaggctgttggtc

SEQ ID NO: 9854 - RNA, 21 nt, RNAi-sense strand
auugcagaggcuguuggucuu

SEQ ID NO: 9855 - RNA, 21 nt, RNAi-antisense strand
gaccaacagccucugcaauuu

SEQ ID NO: 9856 - DNA, 21 bp, Homo sapiens
gaggctgttggtcttccaagt

SEQ ID NO: 9857 - RNA, 21 nt, RNAi-sense strand
ggcuguuggucuuccaaguuu

SEQ ID NO: 9858 - RNA, 21 nt, RNAi-antisense strand
acuuggaagaccaacagccuu

SEQ ID NO: 9859 - DNA, 21 bp, Homo sapiens
gatactatgatgcacagaagc

SEQ ID NO: 9860 - RNA, 21 nt, RNAi-sense strand
uacuaugaugcacagaagcuu

SEQ ID NO: 9861 - RNA, 21 nt, RNAi-antisense strand
gcuucugugcaucauaguauu

SEQ ID NO: 9862 - DNA, 21 bp, Homo sapiens
gatgcacagaagctcctagaa

SEQ ID NO: 9863 - RNA, 21 nt, RNAi-sense strand
ugcacagaagcuccuagaauu

SEQ ID NO: 9864 - RNA, 21 nt, RNAi-antisense strand
uucuaggagcuucugugcauu

SEQ ID NO: 9865 - DNA, 21 bp, Homo sapiens
gatagcagctggagaggaagt

SEQ ID NO: 9866 - RNA, 21 nt, RNAi-sense strand
uagcagcuggagaggaaguuu

SEQ ID NO: 9867 - RNA, 21 nt, RNAi-antisense strand
acuuccucuccagcugcuauu

SEQ ID NO: 9868 - DNA, 21 bp, Homo sapiens
gagaggaagtctcaaagtgcc

SEQ ID NO: 9869 - RNA, 21 nt, RNAi-sense strand
gaggaagucucaaagugccuu

SEQ ID NO: 9870 - RNA, 21 nt, RNAi-antisense strand
ggcacuuugagacuuccucuu

SEQ ID NO: 9871 - DNA, 21 bp, Homo sapiens
gacctggctttactggaaact

SEQ ID NO: 9872 - RNA, 21 nt, RNAi-sense strand
ccuggcuuuacuggaaacuuu

SEQ ID NO: 9873 - RNA, 21 nt, RNAi-antisense strand
aguuuccaguaaagccagguu

SEQ ID NO: 9874 - DNA, 21 bp, Homo sapiens
gatgcacatccactctaccaa

SEQ ID NO: 9875 - RNA, 21 nt, RNAi-sense strand
ugcacauccacucuaccaauu

SEQ ID NO: 9876 - RNA, 21 nt, RNAi-antisense strand
uugguagaguggaugugcauu

SEQ ID NO: 9877 - DNA, 21 bp, Homo sapiens
gataggtactctcagaggagc

SEQ ID NO: 9878 - RNA, 21 nt, RNAi-sense strand
uagguacucucagaggagcuu

SEQ ID NO: 9879 - RNA, 21 nt, RNAi-antisense strand
gcuccucugagaguaccuauu

SEQ ID NO: 9880 - DNA, 21 bp, Homo sapiens
gaggagcagtggaaccagaca

SEQ ID NO: 9881 - RNA, 21 nt, RNAi-sense strand
ggagcaguggaaccagacauu

SEQ ID NO: 9882 - RNA, 21 nt, RNAi-antisense strand
ugucugguuccacugcuccuu

SEQ ID NO: 9883 - DNA, 21 bp, Homo sapiens
gagcagtggaaccagacagat

SEQ ID NO: 9884 - RNA, 21 nt, RNAi-sense strand
gcaguggaaccagacagauuu

SEQ ID NO: 9885 - RNA, 21 nt, RNAi-antisense strand
aucugucugguuccacugcuu

SEQ ID NO: 9886 - DNA, 21 bp, Homo sapiens
gaaccagacagatatgtcatt

SEQ ID NO: 9887 - RNA, 21 nt, RNAi-sense strand
accagacagauaugucauuuu

SEQ ID NO: 9888 - RNA, 21 nt, RNAi-antisense strand
aaugacauaucugucugguuu

SEQ ID NO: 9889 - DNA, 21 bp, Homo sapiens
gagtggagcagctgttgttca

SEQ ID NO: 9890 - RNA, 21 nt, RNAi-sense strand
guggagcagcuguuguucauu

SEQ ID NO: 9891 - RNA, 21 nt, RNAi-antisense strand
ugaacaacagcugcuccacuu

SEQ ID NO: 9892 - DNA, 21 bp, Homo sapiens
gagcagctgttgttcatgaaa

SEQ ID NO: 9893 - RNA, 21 nt, RNAi-sense strand
gcagcuguuguucaugaaauu

SEQ ID NO: 9894 - RNA, 21 nt, RNAi-antisense strand
uuucaugaacaacagcugcuu

SEQ ID NO: 9895 - DNA, 21 bp, Homo sapiens
gaaattgtgaggagctttgga

SEQ ID NO: 9896 - RNA, 21 nt, RNAi-sense strand
aauugugaggagcuuuggauu

SEQ ID NO: 9897 - RNA, 21 nt, RNAi-antisense strand
uccaaagcuccucacaauuuu

SEQ ID NO: 9898 - DNA, 21 bp, Homo sapiens
gaggagctttggaacactgaa

SEQ ID NO: 9899 - RNA, 21 nt, RNAi-sense strand
ggagcuuuggaacacugaauu

SEQ ID NO: 9900 - RNA, 21 nt, RNAi-antisense strand
uucaguguuccaaagcuccuu

SEQ ID NO: 9901 - DNA, 21 bp, Homo sapiens
gatgcagaagaatttggtctt

SEQ ID NO: 9902 - RNA, 21 nt, RNAi-sense strand
ugcagaagaauuuggucuuuu

SEQ ID NO: 9903 - RNA, 21 nt, RNAi-antisense strand
aagaccaaauucuucugcauu

SEQ ID NO: 9904 - DNA, 21 bp, Homo sapiens
gaagaatttggtcttcttggt

SEQ ID NO: 9905 - RNA, 21 nt, RNAi-sense strand
agaauuuggucuucuugguuu

SEQ ID NO: 9906 - RNA, 21 nt, RNAi-antisense strand
accaagaagaccaaauucuuu

SEQ ID NO: 9907 - DNA, 21 bp, Homo sapiens
gaatttggtcttcttggttct

SEQ ID NO: 9908 - RNA, 21 nt, RNAi-sense strand
auuuggucuucuugguucuuu

SEQ ID NO: 9909 - RNA, 21 nt, RNAi-antisense strand
agaaccaagaagaccaaauuu

SEQ ID NO: 9910 - DNA, 21 bp, Homo sapiens
gaggagaattcaagactcctt

SEQ ID NO: 9911 - RNA, 21 nt, RNAi-sense strand
ggagaauucaagacuccuuuu

SEQ ID NO: 9912 - RNA, 21 nt, RNAi-antisense strand
aaggagucuugaauucuccuu

SEQ ID NO: 9913 - DNA, 21 bp, Homo sapiens
gagaattcaagactccttcaa

SEQ ID NO: 9914 - RNA, 21 nt, RNAi-sense strand
gaauucaagacuccuucaauu

SEQ ID NO: 9915 - RNA, 21 nt, RNAi-antisense strand
uugaaggagucuugaauucuu

SEQ ID NO: 9916 - DNA, 21 bp, Homo sapiens
gaattcaagactccttcaaga

SEQ ID NO: 9917 - RNA, 21 nt, RNAi-sense strand
auucaagacuccuucaagauu

SEQ ID NO: 9918 - RNA, 21 nt, RNAi-antisense strand
ucuugaaggagucuugaauuu

SEQ ID NO: 9919 - DNA, 21 bp, Homo sapiens
gactccttcaagagcgtggcg

SEQ ID NO: 9920 - RNA, 21 nt, RNAi-sense strand
cuccuucaagagcguggcguu

SEQ ID NO: 9921 - RNA, 21 nt, RNAi-antisense strand
cgccacgcucuugaaggaguu

SEQ ID NO: 9922 - DNA, 21 bp, Homo sapiens
gagcgtggcgtggcttatatt

SEQ ID NO: 9923 - RNA, 21 nt, RNAi-sense strand
gcguggcguggcuuauauuuu

SEQ ID NO: 9924 - RNA, 21 nt, RNAi-antisense strand
aauauaagccacgccacgcuu

SEQ ID NO: 9925 - DNA, 21 bp, Homo sapiens
gactcatctatagaaggaaac

SEQ ID NO: 9926 - RNA, 21 nt, RNAi-sense strand
cucaucuauagaaggaaacuu

SEQ ID NO: 9927 - RNA, 21 nt, RNAi-antisense strand
guuuccuucuauagaugaguu

SEQ ID NO: 9928 - DNA, 21 bp, Homo sapiens
gaaggaaactacactctgaga

SEQ ID NO: 9929 - RNA, 21 nt, RNAi-sense strand
aggaaacuacacucugagauu

SEQ ID NO: 9930 - RNA, 21 nt, RNAi-antisense strand
ucucagaguguaguuuccuuu

SEQ ID NO: 9931 - DNA, 21 bp, Homo sapiens
gaaactacactctgagagttg

SEQ ID NO: 9932 - RNA, 21 nt, RNAi-sense strand
aacuacacucugagaguuguu

SEQ ID NO: 9933 - RNA, 21 nt, RNAi-antisense strand
caacucucagaguguaguuuu

SEQ ID NO: 9934 - DNA, 21 bp, Homo sapiens
gagagttgattgtacaccgct

SEQ ID NO: 9935 - RNA, 21 nt, RNAi-sense strand
gaguugauuguacaccgcuuu

SEQ ID NO: 9936 - RNA, 21 nt, RNAi-antisense strand
agcgguguacaaucaacucuu

SEQ ID NO: 9937 - DNA, 21 bp, Homo sapiens
gagttgattgtacaccgctga

SEQ ID NO: 9938 - RNA, 21 nt, RNAi-sense strand
guugauuguacaccgcugauu

SEQ ID NO: 9939 - RNA, 21 nt, RNAi-antisense strand
ucagcgguguacaaucaacuu

SEQ ID NO: 9940 - DNA, 21 bp, Homo sapiens
gattgtacaccgctgatgtac

SEQ ID NO: 9941 - RNA, 21 nt, RNAi-sense strand
uuguacaccgcugauguacuu

SEQ ID NO: 9942 - RNA, 21 nt, RNAi-antisense strand
guacaucagcgguguacaauu

SEQ ID NO: 9943 - DNA, 21 bp, Homo sapiens
gatgtacagcttggtacacaa

SEQ ID NO: 9944 - RNA, 21 nt, RNAi-sense strand
uguacagcuugguacacaauu

SEQ ID NO: 9945 - RNA, 21 nt, RNAi-antisense strand
uuguguaccaagcuguacauu

SEQ ID NO: 9946 - DNA, 21 bp, Homo sapiens
gatgaaggctttgaaggcaaa

SEQ ID NO: 9947 - RNA, 21 nt, RNAi-sense strand
ugaaggcuuugaaggcaaauu

SEQ ID NO: 9948 - RNA, 21 nt, RNAi-antisense strand
uuugccuucaaagccuucauu

SEQ ID NO: 9949 - DNA, 21 bp, Homo sapiens
gaaggctttgaaggcaaatct

SEQ ID NO: 9950 - RNA, 21 nt, RNAi-sense strand
aggcuuugaaggcaaaucuuu

SEQ ID NO: 9951 - RNA, 21 nt, RNAi-antisense strand
agauuugccuucaaagccuuu

SEQ ID NO: 9952 - DNA, 21 bp, Homo sapiens
gaaggcaaatctctttatgaa

SEQ ID NO: 9953 - RNA, 21 nt, RNAi-sense strand
aggcaaaucucuuuaugaauu

SEQ ID NO: 9954 - RNA, 21 nt, RNAi-antisense strand
uucauaaagagauuugccuuu

SEQ ID NO: 9955 - DNA, 21 bp, Homo sapiens
gaggtgttcttccaacgactt

SEQ ID NO: 9956 - RNA, 21 nt, RNAi-sense strand
gguguucuuccaacgacuuuu

SEQ ID NO: 9957 - RNA, 21 nt, RNAi-antisense strand
aagucguuggaagaacaccuu

SEQ ID NO: 9958 - DNA, 21 bp, Homo sapiens
gacttggaattgcttcaggca

SEQ ID NO: 9959 - RNA, 21 nt, RNAi-sense strand
cuuggaauugcuucaggcauu

SEQ ID NO: 9960 - RNA, 21 nt, RNAi-antisense strand
ugccugaagcaauuccaaguu

SEQ ID NO: 9961 - DNA, 21 bp, Homo sapiens
gaattgcttcaggcagagcac

SEQ ID NO: 9962 - RNA, 21 nt, RNAi-sense strand
auugcuucaggcagagcacuu

SEQ ID NO: 9963 - RNA, 21 nt, RNAi-antisense strand
gugcucugccugaagcaauuu

SEQ ID NO: 9964 - DNA, 21 bp, Homo sapiens
gaaacaaacaaattcagcggc

SEQ ID NO: 9965 - RNA, 21 nt, RNAi-sense strand
aacaaacaaauucagcggcuu

SEQ ID NO: 9966 - RNA, 21 nt, RNAi-antisense strand
gccgcugaauuuguuuguuuu

SEQ ID NO: 9967 - DNA, 21 bp, Homo sapiens
gaaacatatgagttggtggaa

SEQ ID NO: 9968 - RNA, 21 nt, RNAi-sense strand
aacauaugaguugguggaauu

SEQ ID NO: 9969 - RNA, 21 nt, RNAi-antisense strand
uuccaccaacucauauguuuu

SEQ ID NO: 9970 - DNA, 21 bp, Homo sapiens
gatggtgtttgagctagccaa

SEQ ID NO: 9971 - RNA, 21 nt, RNAi-sense strand
ugguguuugagcuagccaauu

SEQ ID NO: 9972 - RNA, 21 nt, RNAi-antisense strand
uuggcuagcucaaacaccauu

SEQ ID NO: 9973 - DNA, 21 bp, Homo sapiens
gagctagccaattccatagtg

SEQ ID NO: 9974 - RNA, 21 nt, RNAi-sense strand
gcuagccaauuccauaguguu

SEQ ID NO: 9975 - RNA, 21 nt, RNAi-antisense strand
cacuauggaauuggcuagcuu

SEQ ID NO: 9976 - DNA, 21 bp, Homo sapiens
gattgtcgagattatgctgta

SEQ ID NO: 9977 - RNA, 21 nt, RNAi-sense strand
uugucgagauuaugcuguauu

SEQ ID NO: 9978 - RNA, 21 nt, RNAi-antisense strand
uacagcauaaucucgacaauu

SEQ ID NO: 9979 - DNA, 21 bp, Homo sapiens
gaaacatccacaggaaatgaa

SEQ ID NO: 9980 - RNA, 21 nt, RNAi-sense strand
aacauccacaggaaaugaauu

SEQ ID NO: 9981 - RNA, 21 nt, RNAi-antisense strand
uucauuuccuguggauguuuu

SEQ ID NO: 9982 - DNA, 21 bp, Homo sapiens
gaaatgaagacatacagtgta

SEQ ID NO: 9983 - RNA, 21 nt, RNAi-sense strand
aaugaagacauacaguguauu

SEQ ID NO: 9984 - RNA, 21 nt, RNAi-antisense strand
uacacuguaugucuucauuuu

SEQ ID NO: 9985 - DNA, 21 bp, Homo sapiens
gaagacatacagtgtatcatt

SEQ ID NO: 9986 - RNA, 21 nt, RNAi-sense strand
agacauacaguguaucauuuu

SEQ ID NO: 9987 - RNA, 21 nt, RNAi-antisense strand
aaugauacacuguaugucuuu

SEQ ID NO: 9988 - DNA, 21 bp, Homo sapiens
gacatacagtgtatcatttga

SEQ ID NO: 9989 - RNA, 21 nt, RNAi-sense strand
cauacaguguaucauuugauu

SEQ ID NO: 9990 - RNA, 21 nt, RNAi-antisense strand
ucaaaugauacacuguauguu

SEQ ID NO: 9991 - DNA, 21 bp, Homo sapiens
gaaattgcttccaagttcagt

SEQ ID NO: 9992 - RNA, 21 nt, RNAi-sense strand
aauugcuuccaaguucaguuu

SEQ ID NO: 9993 - RNA, 21 nt, RNAi-antisense strand
acugaacuuggaagcaauuuu

SEQ ID NO: 9994 - DNA, 21 bp, Homo sapiens
gagagactccaggactttgac

SEQ ID NO: 9995 - RNA, 21 nt, RNAi-sense strand
gagacuccaggacuuugacuu

SEQ ID NO: 9996 - RNA, 21 nt, RNAi-antisense strand
gucaaaguccuggagucucuu

SEQ ID NO: 9997 - DNA, 21 bp, Homo sapiens
gagactccaggactttgacaa

SEQ ID NO: 9998 - RNA, 21 nt, RNAi-sense strand
gacuccaggacuuugacaauu

SEQ ID NO: 9999 - RNA, 21 nt, RNAi-antisense strand
uugucaaaguccuggagucuu

SEQ ID NO: 10000 - DNA, 21 bp, Homo sapiens
gaatgatgaatgatcaactca

SEQ ID NO: 10001 - RNA, 21 nt, RNAi-sense strand
augaugaaugaucaacucauu

SEQ ID NO: 10002 - RNA, 21 nt, RNAi-antisense strand
ugaguugaucauucaucauuu

SEQ ID NO: 10003 - DNA, 21 bp, Homo sapiens
gatgaatgatcaactcatgtt

SEQ ID NO: 10004 - RNA, 21 nt, RNAi-sense strand
ugaaugaucaacucauguuuu

SEQ ID NO: 10005 - RNA, 21 nt, RNAi-antisense strand
aacaugaguugaucauucauu

SEQ ID NO: 10006 - DNA, 21 bp, Homo sapiens
gaatgatcaactcatgtttct

SEQ ID NO: 10007 - RNA, 21 nt, RNAi-sense strand
augaucaacucauguuucuuu

SEQ ID NO: 10008 - RNA, 21 nt, RNAi-antisense strand
agaaacaugaguugaucauuu

SEQ ID NO: 10009 - DNA, 21 bp, Homo sapiens
gatcaactcatgtttctggaa

SEQ ID NO: 10010 - RNA, 21 nt, RNAi-sense strand
ucaacucauguuucuggaauu

SEQ ID NO: 10011 - RNA, 21 nt, RNAi-antisense strand
uuccagaaacaugaguugauu

SEQ ID NO: 10012 - DNA, 21 bp, Homo sapiens
gaaagagcatttattgatcca

SEQ ID NO: 10013 - RNA, 21 nt, RNAi-sense strand
aagagcauuuauugauccauu

SEQ ID NO: 10014 - RNA, 21 nt, RNAi-antisense strand
uggaucaauaaaugcucuuuu

SEQ ID NO: 10015 - DNA, 21 bp, Homo sapiens
gagcatttattgatccattag

SEQ ID NO: 10016 - RNA, 21 nt, RNAi-sense strand
gcauuuauugauccauuaguu

SEQ ID NO: 10017 - RNA, 21 nt, RNAi-antisense strand
cuaauggaucaauaaaugcuu

SEQ ID NO: 10018 - DNA, 21 bp, Homo sapiens
gaatttatgatgctctgtttg

SEQ ID NO: 10019 - RNA, 21 nt, RNAi-sense strand
auuuaugaugcucuguuuguu

SEQ ID NO: 10020 - RNA, 21 nt, RNAi-antisense strand
caaacagagcaucauaaauuu

SEQ ID NO: 10021 - DNA, 21 bp, Homo sapiens
gatgctctgtttgatattgaa

SEQ ID NO: 10022 - RNA, 21 nt, RNAi-sense strand
ugcucuguuugauauugaauu

SEQ ID NO: 10023 - RNA, 21 nt, RNAi-antisense strand
uucaauaucaaacagagcauu

SEQ ID NO: 10024 - DNA, 21 bp, Homo sapiens
gatattgaaagcaaagtggac

SEQ ID NO: 10025 - RNA, 21 nt, RNAi-sense strand
uauugaaagcaaaguggacuu

SEQ ID NO: 10026 - RNA, 21 nt, RNAi-antisense strand
guccacuuugcuuucaauauu

SEQ ID NO: 10027 - DNA, 21 bp, Homo sapiens
gagaagtgaagagacagattt

SEQ ID NO: 10028 - RNA, 21 nt, RNAi-sense strand
gaagugaagagacagauuuuu

SEQ ID NO: 10029 - RNA, 21 nt, RNAi-antisense strand
aaaucugucucuucacuucuu

SEQ ID NO: 10030 - DNA, 21 bp, Homo sapiens
gaagtgaagagacagatttat

SEQ ID NO: 10031 - RNA, 21 nt, RNAi-sense strand
agugaagagacagauuuauuu

SEQ ID NO: 10032 - RNA, 21 nt, RNAi-antisense strand
auaaaucugucucuucacuuu

SEQ ID NO: 10033 - DNA, 21 bp, Homo sapiens
gaagagacagatttatgttgc

SEQ ID NO: 10034 - RNA, 21 nt, RNAi-sense strand
agagacagauuuauguugcuu

SEQ ID NO: 10035 - RNA, 21 nt, RNAi-antisense strand
gcaacauaaaucugucucuuu

SEQ ID NO: 10036 - DNA, 21 bp, Homo sapiens
gagacagatttatgttgcagc

SEQ ID NO: 10037 - RNA, 21 nt, RNAi-sense strand
gacagauuuauguugcagcuu

SEQ ID NO: 10038 - RNA, 21 nt, RNAi-antisense strand
gcugcaacauaaaucugucuu

SEQ ID NO: 10039 - DNA, 21 bp, Homo sapiens
gacagatttatgttgcagcct

SEQ ID NO: 10040 - RNA, 21 nt, RNAi-sense strand
cagauuuauguugcagccuuu

SEQ ID NO: 10041 - RNA, 21 nt, RNAi-antisense strand
aggcugcaacauaaaucuguu

SEQ ID NO: 10042 - DNA, 21 bp, Homo sapiens
gatttatgttgcagccttcac

SEQ ID NO: 10043 - RNA, 21 nt, RNAi-sense strand
uuuauguugcagccuucacuu

SEQ ID NO: 10044 - RNA, 21 nt, RNAi-antisense strand
gugaaggcugcaacauaaauu

SEQ ID NO: 10045 - DNA, 21 bp, Homo sapiens
gagactttgagtgaagtagcc

SEQ ID NO: 10046 - RNA, 21 nt, RNAi-sense strand
gacuuugagugaaguagccuu

SEQ ID NO: 10047 - RNA, 21 nt, RNAi-antisense strand
ggcuacuucacucaaagucuu

SEQ ID NO: 10048 - DNA, 21 bp, Homo sapiens
gactttgagtgaagtagccta

SEQ ID NO: 10049 - RNA, 21 nt, RNAi-sense strand
cuuugagugaaguagccuauu

SEQ ID NO: 10050 - RNA, 21 nt, RNAi-antisense strand
uaggcuacuucacucaaaguu

SEQ ID NO: 10051 - DNA, 21 bp, Homo sapiens
gagtgaagtagcctaagagga

SEQ ID NO: 10052 - RNA, 21 nt, RNAi-sense strand
gugaaguagccuaagaggauu

SEQ ID NO: 10053 - RNA, 21 nt, RNAi-antisense strand
uccucuuaggcuacuucacuu

SEQ ID NO: 10054 - DNA, 21 bp, Homo sapiens
gaagtagcctaagaggattct

SEQ ID NO: 10055 - RNA, 21 nt, RNAi-sense strand
aguagccuaagaggauucuuu

SEQ ID NO: 10056 - RNA, 21 nt, RNAi-antisense strand
agaauccucuuaggcuacuuu

SEQ ID NO: 10057 - DNA, 21 bp, Homo sapiens
gaggattctttagagaatccg

SEQ ID NO: 10058 - RNA, 21 nt, RNAi-sense strand
ggauucuuuagagaauccguu

SEQ ID NO: 10059 - RNA, 21 nt, RNAi-antisense strand
cggauucucuaaagaauccuu

SEQ ID NO: 10060 - DNA, 21 bp, Homo sapiens
gattctttagagaatccgtat

SEQ ID NO: 10061 - RNA, 21 nt, RNAi-sense strand
uucuuuagagaauccguauuu

SEQ ID NO: 10062 - RNA, 21 nt, RNAi-antisense strand
auacggauucucuaaagaauu

SEQ ID NO: 10063 - DNA, 21 bp, Homo sapiens
gagaatccgtattgaatttgt

SEQ ID NO: 10064 - RNA, 21 nt, RNAi-sense strand
gaauccguauugaauuuguuu

SEQ ID NO: 10065 - RNA, 21 nt, RNAi-antisense strand
acaaauucaauacggauucuu

SEQ ID NO: 10066 - DNA, 21 bp, Homo sapiens
gaatccgtattgaatttgtgt

SEQ ID NO: 10067 - RNA, 21 nt, RNAi-sense strand
auccguauugaauuuguguuu

SEQ ID NO: 10068 - RNA, 21 nt, RNAi-antisense strand
acacaaauucaauacggauuu

SEQ ID NO: 10069 - DNA, 21 bp, Homo sapiens
gaatttgtgtggtatgtcact

SEQ ID NO: 10070 - RNA, 21 nt, RNAi-sense strand
auuugugugguaugucacuuu

SEQ ID NO: 10071 - RNA, 21 nt, RNAi-antisense strand
agugacauaccacacaaauuu

SEQ ID NO: 10072 - DNA, 21 bp, Homo sapiens
tagaaacactgctgtggtgga

SEQ ID NO: 10073 - RNA, 21 nt, RNAi-sense strand
gaaacacugcugugguggauu

SEQ ID NO: 10074 - RNA, 21 nt, RNAi-antisense strand
uccaccacagcaguguuucuu

SEQ ID NO: 10075 - DNA, 21 bp, Homo sapiens
taagcgaggcattagtgagat

SEQ ID NO: 10076 - RNA, 21 nt, RNAi-sense strand
agcgaggcauuagugagauuu

SEQ ID NO: 10077 - RNA, 21 nt, RNAi-antisense strand
aucucacuaaugccucgcuuu

SEQ ID NO: 10078 - DNA, 21 bp, Homo sapiens
tagtgagattgagagagactt

SEQ ID NO: 10079 - RNA, 21 nt, RNAi-sense strand
gugagauugagagagacuuuu

SEQ ID NO: 10080 - RNA, 21 nt, RNAi-antisense strand
aagucucucucaaucucacuu

SEQ ID NO: 10081 - DNA, 21 bp, Homo sapiens
tactaacattactccaaagca

SEQ ID NO: 10082 - RNA, 21 nt, RNAi-sense strand
cuaacauuacuccaaagcauu

SEQ ID NO: 10083 - RNA, 21 nt, RNAi-antisense strand
ugcuuuggaguaauguuaguu

SEQ ID NO: 10084 - DNA, 21 bp, Homo sapiens
tacacagataccacatttagc

SEQ ID NO: 10085 - RNA, 21 nt, RNAi-sense strand
cacagauaccacauuuagcuu

SEQ ID NO: 10086 - RNA, 21 nt, RNAi-antisense strand
gcuaaaugugguaucuguguu

SEQ ID NO: 10087 - DNA, 21 bp, Homo sapiens
taccacatttagcaggaacag

SEQ ID NO: 10088 - RNA, 21 nt, RNAi-sense strand
ccacauuuagcaggaacaguu

SEQ ID NO: 10089 - RNA, 21 nt, RNAi-antisense strand
cuguuccugcuaaaugugguu

SEQ ID NO: 10090 - DNA, 21 bp, Homo sapiens
tagcacattatgatgtcctgt

SEQ ID NO: 10091 - RNA, 21 nt, RNAi-sense strand
gcacauuaugauguccuguuu

SEQ ID NO: 10092 - RNA, 21 nt, RNAi-antisense strand
acaggacaucauaaugugcuu

SEQ ID NO: 10093 - DNA, 21 bp, Homo sapiens
tatgatgtcctgttgtcctac

SEQ ID NO: 10094 - RNA, 21 nt, RNAi-sense strand
ugauguccuguuguccuacuu

SEQ ID NO: 10095 - RNA, 21 nt, RNAi-antisense strand
guaggacaacaggacaucauu

SEQ ID NO: 10096 - DNA, 21 bp, Homo sapiens
tatttgaaccacctcctccag

SEQ ID NO: 10097 - RNA, 21 nt, RNAi-sense strand
uuugaaccaccuccuccaguu

SEQ ID NO: 10098 - RNA, 21 nt, RNAi-antisense strand
cuggaggaggugguucaaauu

SEQ ID NO: 10099 - DNA, 21 bp, Homo sapiens
tattgtaccacctttcagtgc

SEQ ID NO: 10100 - RNA, 21 nt, RNAi-sense strand
uuguaccaccuuucagugcuu

SEQ ID NO: 10101 - RNA, 21 nt, RNAi-antisense strand
gcacugaaaggugguacaauu

SEQ ID NO: 10102 - DNA, 21 bp, Homo sapiens
taccacctttcagtgctttct

SEQ ID NO: 10103 - RNA, 21 nt, RNAi-sense strand
ccaccuuucagugcuuucuuu

SEQ ID NO: 10104 - RNA, 21 nt, RNAi-antisense strand
agaaagcacugaaaggugguu

SEQ ID NO: 10105 - DNA, 21 bp, Homo sapiens
tagtgtatgttaactatgcac

SEQ ID NO: 10106 - RNA, 21 nt, RNAi-sense strand
guguauguuaacuaugcacuu

SEQ ID NO: 10107 - RNA, 21 nt, RNAi-antisense strand
gugcauaguuaacauacacuu

SEQ ID NO: 10108 - DNA, 21 bp, Homo sapiens
tatgttaactatgcacgaact

SEQ ID NO: 10109 - RNA, 21 nt, RNAi-sense strand
uguuaacuaugcacgaacuuu

SEQ ID NO: 10110 - RNA, 21 nt, RNAi-antisense strand
aguucgugcauaguuaacauu

SEQ ID NO: 10111 - DNA, 21 bp, Homo sapiens
taactatgcacgaactgaaga

SEQ ID NO: 10112 - RNA, 21 nt, RNAi-sense strand
acuaugcacgaacugaagauu

SEQ ID NO: 10113 - RNA, 21 nt, RNAi-antisense strand
ucuucaguucgugcauaguuu

SEQ ID NO: 10114 - DNA, 21 bp, Homo sapiens
tatgcacgaactgaagacttc

SEQ ID NO: 10115 - RNA, 21 nt, RNAi-sense strand
ugcacgaacugaagacuucuu

SEQ ID NO: 10116 - RNA, 21 nt, RNAi-antisense strand
gaagucuucaguucgugcauu

SEQ ID NO: 10117 - DNA, 21 bp, Homo sapiens
tatccagatggttggaatctt

SEQ ID NO: 10118 - RNA, 21 nt, RNAi-sense strand
uccagaugguuggaaucuuuu

SEQ ID NO: 10119 - RNA, 21 nt, RNAi-antisense strand
aagauuccaaccaucuggauu

SEQ ID NO: 10120 - DNA, 21 bp, Homo sapiens
tatcctaaatctgaatggtgc

SEQ ID NO: 10121 - RNA, 21 nt, RNAi-sense strand
uccuaaaucugaauggugcuu

SEQ ID NO: 10122 - RNA, 21 nt, RNAi-antisense strand
gcaccauucagauuuaggauu

SEQ ID NO: 10123 - DNA, 21 bp, Homo sapiens
taaatctgaatggtgcaggag

SEQ ID NO: 10124 - RNA, 21 nt, RNAi-sense strand
aaucugaauggugcaggaguu

SEQ ID NO: 10125 - RNA, 21 nt, RNAi-antisense strand
cuccugcaccauucagauuuu

SEQ ID NO: 10126 - DNA, 21 bp, Homo sapiens
tatgcttataggcgtggaatt

SEQ ID NO: 10127 - RNA, 21 nt, RNAi-sense strand
ugcuuauaggcguggaauuuu

SEQ ID NO: 10128 - RNA, 21 nt, RNAi-antisense strand
aauuccacgccuauaagcauu

SEQ ID NO: 10129 - DNA, 21 bp, Homo sapiens
tataggcgtggaattgcagag

SEQ ID NO: 10130 - RNA, 21 nt, RNAi-sense strand
uaggcguggaauugcagaguu

SEQ ID NO: 10131 - RNA, 21 nt, RNAi-antisense strand
cucugcaauuccacgccuauu

SEQ ID NO: 10132 - DNA, 21 bp, Homo sapiens
taggcgtggaattgcagaggc

SEQ ID NO: 10133 - RNA, 21 nt, RNAi-sense strand
ggcguggaauugcagaggcuu

SEQ ID NO: 10134 - RNA, 21 nt, RNAi-antisense strand
gccucugcaauuccacgccuu

SEQ ID NO: 10135 - DNA, 21 bp, Homo sapiens
tattcctgttcatccaattgg

SEQ ID NO: 10136 - RNA, 21 nt, RNAi-sense strand
uuccuguucauccaauugguu

SEQ ID NO: 10137 - RNA, 21 nt, RNAi-antisense strand
ccaauuggaugaacaggaauu

SEQ ID NO: 10138 - DNA, 21 bp, Homo sapiens
tactatgatgcacagaagctc

SEQ ID NO: 10139 - RNA, 21 nt, RNAi-sense strand
cuaugaugcacagaagcucuu

SEQ ID NO: 10140 - RNA, 21 nt, RNAi-antisense strand
gagcuucugugcaucauaguu

SEQ ID NO: 10141 - DNA, 21 bp, Homo sapiens
tatgatgcacagaagctccta

SEQ ID NO: 10142 - RNA, 21 nt, RNAi-sense strand
ugaugcacagaagcuccuauu

SEQ ID NO: 10143 - RNA, 21 nt, RNAi-antisense strand
uaggagcuucugugcaucauu

SEQ ID NO: 10144 - DNA, 21 bp, Homo sapiens
tagcagctggagaggaagtct

SEQ ID NO: 10145 - RNA, 21 nt, RNAi-sense strand
gcagcuggagaggaagucuuu

SEQ ID NO: 10146 - RNA, 21 nt, RNAi-antisense strand
agacuuccucuccagcugcuu

SEQ ID NO: 10147 - DNA, 21 bp, Homo sapiens
tacaatgttggacctggcttt

SEQ ID NO: 10148 - RNA, 21 nt, RNAi-sense strand
caauguuggaccuggcuuuuu

SEQ ID NO: 10149 - RNA, 21 nt, RNAi-antisense strand
aaagccagguccaacauuguu

SEQ ID NO: 10150 - DNA, 21 bp, Homo sapiens
taccaatgaagtgacaagaat

SEQ ID NO: 10151 - RNA, 21 nt, RNAi-sense strand
ccaaugaagugacaagaauuu

SEQ ID NO: 10152 - RNA, 21 nt, RNAi-antisense strand
auucuugucacuucauugguu

SEQ ID NO: 10153 - DNA, 21 bp, Homo sapiens
tacaatgtgataggtactctc

SEQ ID NO: 10154 - RNA, 21 nt, RNAi-sense strand
caaugugauagguacucucuu

SEQ ID NO: 10155 - RNA, 21 nt, RNAi-antisense strand
gagaguaccuaucacauuguu

SEQ ID NO: 10156 - DNA, 21 bp, Homo sapiens
taggtactctcagaggagcag

SEQ ID NO: 10157 - RNA, 21 nt, RNAi-sense strand
gguacucucagaggagcaguu

SEQ ID NO: 10158 - RNA, 21 nt, RNAi-antisense strand
cugcuccucugagaguaccuu

SEQ ID NO: 10159 - DNA, 21 bp, Homo sapiens
tactctcagaggagcagtgga

SEQ ID NO: 10160 - RNA, 21 nt, RNAi-sense strand
cucucagaggagcaguggauu

SEQ ID NO: 10161 - RNA, 21 nt, RNAi-antisense strand
uccacugcuccucugagaguu

SEQ ID NO: 10162 - DNA, 21 bp, Homo sapiens
taatgctgactcatctataga

SEQ ID NO: 10163 - RNA, 21 nt, RNAi-sense strand
augcugacucaucuauagauu

SEQ ID NO: 10164 - RNA, 21 nt, RNAi-antisense strand
ucuauagaugagucagcauuu

SEQ ID NO: 10165 - DNA, 21 bp, Homo sapiens
tatagaaggaaactacactct

SEQ ID NO: 10166 - RNA, 21 nt, RNAi-sense strand
uagaaggaaacuacacucuuu

SEQ ID NO: 10167 - RNA, 21 nt, RNAi-antisense strand
agaguguaguuuccuucuauu

SEQ ID NO: 10168 - DNA, 21 bp, Homo sapiens
tagaaggaaactacactctga

SEQ ID NO: 10169 - RNA, 21 nt, RNAi-sense strand
gaaggaaacuacacucugauu

SEQ ID NO: 10170 - RNA, 21 nt, RNAi-antisense strand
ucagaguguaguuuccuucuu

SEQ ID NO: 10171 - DNA, 21 bp, Homo sapiens
tacactctgagagttgattgt

SEQ ID NO: 10172 - RNA, 21 nt, RNAi-sense strand
cacucugagaguugauuguuu

SEQ ID NO: 10173 - RNA, 21 nt, RNAi-antisense strand
acaaucaacucucagaguguu

SEQ ID NO: 10174 - DNA, 21 bp, Homo sapiens
tacaccgctgatgtacagctt

SEQ ID NO: 10175 - RNA, 21 nt, RNAi-sense strand
caccgcugauguacagcuuuu

SEQ ID NO: 10176 - RNA, 21 nt, RNAi-antisense strand
aagcuguacaucagcgguguu

SEQ ID NO: 10177 - DNA, 21 bp, Homo sapiens
tacagcttggtacacaaccta

SEQ ID NO: 10178 - RNA, 21 nt, RNAi-sense strand
cagcuugguacacaaccuauu

SEQ ID NO: 10179 - RNA, 21 nt, RNAi-antisense strand
uagguuguguaccaagcuguu

SEQ ID NO: 10180 - DNA, 21 bp, Homo sapiens
tatccactgtatcacagtgtc

SEQ ID NO: 10181 - RNA, 21 nt, RNAi-sense strand
uccacuguaucacagugucuu

SEQ ID NO: 10182 - RNA, 21 nt, RNAi-antisense strand
gacacugugauacaguggauu

SEQ ID NO: 10183 - DNA, 21 bp, Homo sapiens
tatcacagtgtctatgaaaca

SEQ ID NO: 10184 - RNA, 21 nt, RNAi-sense strand
ucacagugucuaugaaacauu

SEQ ID NO: 10185 - RNA, 21 nt, RNAi-antisense strand
uguuucauagacacugugauu

SEQ ID NO: 10186 - DNA, 21 bp, Homo sapiens
tatgaaacatatgagttggtg

SEQ ID NO: 10187 - RNA, 21 nt, RNAi-sense strand
ugaaacauaugaguugguguu

SEQ ID NO: 10188 - RNA, 21 nt, RNAi-antisense strand
caccaacucauauguuucauu

SEQ ID NO: 10189 - DNA, 21 bp, Homo sapiens
taaatatcacctcactgtggc

SEQ ID NO: 10190 - RNA, 21 nt, RNAi-sense strand
aauaucaccucacuguggcuu

SEQ ID NO: 10191 - RNA, 21 nt, RNAi-antisense strand
gccacagugaggugauauuuu

SEQ ID NO: 10192 - DNA, 21 bp, Homo sapiens
tagccaattccatagtgctcc

SEQ ID NO: 10193 - RNA, 21 nt, RNAi-sense strand
gccaauuccauagugcuccuu

SEQ ID NO: 10194 - RNA, 21 nt, RNAi-antisense strand
ggagcacuauggaauuggcuu

SEQ ID NO: 10195 - DNA, 21 bp, Homo sapiens
tatgaaacatccacaggaaat

SEQ ID NO: 10196 - RNA, 21 nt, RNAi-sense strand
ugaaacauccacaggaaauuu

SEQ ID NO: 10197 - RNA, 21 nt, RNAi-antisense strand
auuuccuguggauguuucauu

SEQ ID NO: 10198 - DNA, 21 bp, Homo sapiens
tacagaaattgcttccaagtt

SEQ ID NO: 10199 - RNA, 21 nt, RNAi-sense strand
cagaaauugcuuccaaguuuu

SEQ ID NO: 10200 - RNA, 21 nt, RNAi-antisense strand
aacuuggaagcaauuucuguu

SEQ ID NO: 10201 - DNA, 21 bp, Homo sapiens
tataggcatgtcatctatgct

SEQ ID NO: 10202 - RNA, 21 nt, RNAi-sense strand
uaggcaugucaucuaugcuuu

SEQ ID NO: 10203 - RNA, 21 nt, RNAi-antisense strand
agcauagaugacaugccuauu

SEQ ID NO: 10204 - DNA, 21 bp, Homo sapiens
taggcatgtcatctatgctcc

SEQ ID NO: 10205 - RNA, 21 nt, RNAi-sense strand
ggcaugucaucuaugcuccuu

SEQ ID NO: 10206 - RNA, 21 nt, RNAi-antisense strand
ggagcauagaugacaugccuu

SEQ ID NO: 10207 - DNA, 21 bp, Homo sapiens
tatgctccaagcagccacaac

SEQ ID NO: 10208 - RNA, 21 nt, RNAi-sense strand
ugcuccaagcagccacaacuu

SEQ ID NO: 10209 - RNA, 21 nt, RNAi-antisense strand
guuguggcugcuuggagcauu

SEQ ID NO: 10210 - DNA, 21 bp, Homo sapiens
tatgttgcagccttcacagtg

SEQ ID NO: 10211 - RNA, 21 nt, RNAi-sense strand
uguugcagccuucacaguguu

SEQ ID NO: 10212 - RNA, 21 nt, RNAi-antisense strand
cacugugaaggcugcaacauu

SEQ ID NO: 10213 - DNA, 21 bp, Homo sapiens
tagcctaagaggattctttag

SEQ ID NO: 10214 - RNA, 21 nt, RNAi-sense strand
gccuaagaggauucuuuaguu

SEQ ID NO: 10215 - RNA, 21 nt, RNAi-antisense strand
cuaaagaauccucuuaggcuu

SEQ ID NO: 10216 - DNA, 21 bp, Homo sapiens
tatgtcactcagaaagaatcg

SEQ ID NO: 10217 - RNA, 21 nt, RNAi-sense strand
ugucacucagaaagaaucguu

SEQ ID NO: 10218 - RNA, 21 nt, RNAi-antisense strand
cgauucuuucugagugacauu

SEQ ID NO: 10219 - DNA, 21 bp, Homo sapiens
aaatgtttcggatattgtacc

SEQ ID NO: 10220 - RNA, 21 nt, RNAi-sense strand
auguuucggauauuguaccuu

SEQ ID NO: 10221 - RNA, 21 nt, RNAi-antisense strand
gguacaauauccgaaacauuu

SEQ ID NO: 10222 - DNA, 21 bp, Homo sapiens
aatgtttcggatattgtacca

SEQ ID NO: 10223 - RNA, 21 nt, RNAi-sense strand
uguuucggauauuguaccauu

SEQ ID NO: 10224 - RNA, 21 nt, RNAi-antisense strand
ugguacaauauccgaaacauu

SEQ ID NO: 10225 - DNA, 21 bp, Homo sapiens
aactatgcacgaactgaagac

SEQ ID NO: 10226 - RNA, 21 nt, RNAi-sense strand
cuaugcacgaacugaagacuu

SEQ ID NO: 10227 - RNA, 21 nt, RNAi-antisense strand
gucuucaguucgugcauaguu

SEQ ID NO: 10228 - DNA, 21 bp, Homo sapiens
aattgtaattgccagatatgg

SEQ ID NO: 10229 - RNA, 21 nt, RNAi-sense strand
uuguaauugccagauaugguu

SEQ ID NO: 10230 - RNA, 21 nt, RNAi-antisense strand
ccauaucuggcaauuacaauu

SEQ ID NO: 10231 - DNA, 21 bp, Homo sapiens
aatgaatatgcttataggcgt

SEQ ID NO: 10232 - RNA, 21 nt, RNAi-sense strand
ugaauaugcuuauaggcguuu

SEQ ID NO: 10233 - RNA, 21 nt, RNAi-antisense strand
acgccuauaagcauauucauu

SEQ ID NO: 10234 - DNA, 21 bp, Homo sapiens
cagcttggtacacaacctaac

SEQ ID NO: 10235 - RNA, 21 nt, RNAi-sense strand
gcuugguacacaaccuaacuu

SEQ ID NO: 10236 - RNA, 21 nt, RNAi-antisense strand
guuagguuguguaccaagcuu

SEQ ID NO: 10237 - DNA, 21 bp, Homo sapiens
gatattgtaccacctttcagt

SEQ ID NO: 10238 - RNA, 21 nt, RNAi-sense strand
uauuguaccaccuuucaguuu

SEQ ID NO: 10239 - RNA, 21 nt, RNAi-antisense strand
acugaaaggugguacaauauu

SEQ ID NO: 10240 - DNA, 21 bp, Homo sapiens
gaatatgcttataggcgtgga

SEQ ID NO: 10241 - RNA, 21 nt, RNAi-sense strand
auaugcuuauaggcguggauu

SEQ ID NO: 10242 - RNA, 21 nt, RNAi-antisense strand
uccacgccuauaagcauauuu

SEQ ID NO: 10243 - DNA, 21 bp, Homo sapiens
tattgtaccacctttcagtgc

SEQ ID NO: 10244 - RNA, 21 nt, RNAi-sense strand
uuguaccaccuuucagugcuu

SEQ ID NO: 10245 - RNA, 21 nt, RNAi-antisense strand
gcacugaaaggugguacaauu

SEQ ID NO: 10246 - DNA, 21 bp, Homo sapiens
tatgttaactatgcacgaact

SEQ ID NO: 10247 - RNA, 21 nt, RNAi-sense strand
uguuaacuaugcacgaacuuu

SEQ ID NO: 10248 - RNA, 21 nt, RNAi-antisense strand
aguucgugcauaguuaacauu

SEQ ID NO: 10249 - DNA, 21 bp, Homo sapiens
tatgcacgaactgaagacttc

SEQ ID NO: 10250 - RNA, 21 nt, RNAi-sense strand
ugcacgaacugaagacuucuu

SEQ ID NO: 10251 - RNA, 21 nt, RNAi-antisense strand
gaagucuucaguucgugcauu

SEQ ID NO: 10252 - DNA, 21 bp, Homo sapiens
tacagcttggtacacaaccta

SEQ ID NO: 10253 - RNA, 21 nt, RNAi-sense strand
cagcuugguacacaaccuauu

SEQ ID NO: 10254 - RNA, 21 nt, RNAi-antisense strand
uagguuguguaccaagcuguu

SEQ ID NO: 10255 - DNA, 21 bp, Homo sapiens
aactcgctggtcatctacgtc

SEQ ID NO: 10256 - RNA, 21 nt, RNAi-sense strand
cucgcuggucaucuacgucuu

SEQ ID NO: 10257 - RNA, 21 nt, RNAi-antisense strand
gacguagaugaccagcgaguu

SEQ ID NO: 10258 - DNA, 21 bp, Homo sapiens
aacttctacatcgccaacctg

SEQ ID NO: 10259 - RNA, 21 nt, RNAi-sense strand
cuucuacaucgccaaccuguu

SEQ ID NO: 10260 - RNA, 21 nt, RNAi-antisense strand
cagguuggcgauguagaaguu

SEQ ID NO: 10261 - DNA, 21 bp, Homo sapiens
aagttcgtcaactacatccag

SEQ ID NO: 10262 - RNA, 21 nt, RNAi-sense strand
guucgucaacuacauccaguu

SEQ ID NO: 10263 - RNA, 21 nt, RNAi-antisense strand
cuggauguaguugacgaacuu

SEQ ID NO: 10264 - DNA, 21 bp, Homo sapiens
aactacatccagcaggtctcg

SEQ ID NO: 10265 - RNA, 21 nt, RNAi-sense strand
cuacauccagcaggucucguu

SEQ ID NO: 10266 - RNA, 21 nt, RNAi-antisense strand
cgagaccugcuggauguaguu

SEQ ID NO: 10267 - DNA, 21 bp, Homo sapiens
aacctgctggcgctgtacctg

SEQ ID NO: 10268 - RNA, 21 nt, RNAi-sense strand
ccugcuggcgcuguaccuguu

SEQ ID NO: 10269 - RNA, 21 nt, RNAi-antisense strand
cagguacagcgccagcagguu

SEQ ID NO: 10270 - DNA, 21 bp, Homo sapiens
catctacgtcatctgccgcca

SEQ ID NO: 10271 - RNA, 21 nt, RNAi-sense strand
ucuacgucaucugccgccauu

SEQ ID NO: 10272 - RNA, 21 nt, RNAi-antisense strand
uggcggcagaugacguagauu

SEQ ID NO: 10273 - DNA, 21 bp, Homo sapiens
catctgccgccacaagccgat

SEQ ID NO: 10274 - RNA, 21 nt, RNAi-sense strand
ucugccgccacaagccgauuu

SEQ ID NO: 10275 - RNA, 21 nt, RNAi-antisense strand
aucggcuuguggcggcagauu

SEQ ID NO: 10276 - DNA, 21 bp, Homo sapiens
caacttctacatcgccaacct

SEQ ID NO: 10277 - RNA, 21 nt, RNAi-sense strand
acuucuacaucgccaaccuuu

SEQ ID NO: 10278 - RNA, 21 nt, RNAi-antisense strand
agguuggcgauguagaaguuu

SEQ ID NO: 10279 - DNA, 21 bp, Homo sapiens
cacggacgtgaccttcctcct

SEQ ID NO: 10280 - RNA, 21 nt, RNAi-sense strand
cggacgugaccuuccuccuuu

SEQ ID NO: 10281 - RNA, 21 nt, RNAi-antisense strand
aggaggaaggucacguccguu

SEQ ID NO: 10282 - DNA, 21 bp, Homo sapiens
catgtgcaagttcgtcaacta

SEQ ID NO: 10283 - RNA, 21 nt, RNAi-sense strand
ugugcaaguucgucaacuauu

SEQ ID NO: 10284 - RNA, 21 nt, RNAi-antisense strand
uaguugacgaacuugcacauu

SEQ ID NO: 10285 - DNA, 21 bp, Homo sapiens
caagttcgtcaactacatcca

SEQ ID NO: 10286 - RNA, 21 nt, RNAi-sense strand
aguucgucaacuacauccauu

SEQ ID NO: 10287 - RNA, 21 nt, RNAi-antisense strand
uggauguaguugacgaacuuu

SEQ ID NO: 10288 - DNA, 21 bp, Homo sapiens
caactacatccagcaggtctc

SEQ ID NO: 10289 - RNA, 21 nt, RNAi-sense strand
acuacauccagcaggucucuu

SEQ ID NO: 10290 - RNA, 21 nt, RNAi-antisense strand
gagaccugcuggauguaguuu

SEQ ID NO: 10291 - DNA, 21 bp, Homo sapiens
catccagcaggtctcggtgca

SEQ ID NO: 10292 - RNA, 21 nt, RNAi-sense strand
uccagcaggucucggugcauu

SEQ ID NO: 10293 - RNA, 21 nt, RNAi-antisense strand
ugcaccgagaccugcuggauu

SEQ ID NO: 10294 - DNA, 21 bp, Homo sapiens
cactctgaccgccatgagtgt

SEQ ID NO: 10295 - RNA, 21 nt, RNAi-sense strand
cucugaccgccaugaguguuu

SEQ ID NO: 10296 - RNA, 21 nt, RNAi-antisense strand
acacucauggcggucagaguu

SEQ ID NO: 10297 - DNA, 21 bp, Homo sapiens
catgagtgtggaccgctggta

SEQ ID NO: 10298 - RNA, 21 nt, RNAi-sense strand
ugaguguggaccgcugguauu

SEQ ID NO: 10299 - RNA, 21 nt, RNAi-antisense strand
uaccagcgguccacacucauu

SEQ ID NO: 10300 - DNA, 21 bp, Homo sapiens
cactgtacaacctgctggcgc

SEQ ID NO: 10301 - RNA, 21 nt, RNAi-sense strand
cuguacaaccugcuggcgcuu

SEQ ID NO: 10302 - RNA, 21 nt, RNAi-antisense strand
gcgccagcagguuguacaguu

SEQ ID NO: 10303 - DNA, 21 bp, Homo sapiens
caacctgctggcgctgtacct

SEQ ID NO: 10304 - RNA, 21 nt, RNAi-sense strand
accugcuggcgcuguaccuuu

SEQ ID NO: 10305 - RNA, 21 nt, RNAi-antisense strand
agguacagcgccagcagguuu

SEQ ID NO: 10306 - DNA, 21 bp, Homo sapiens
catccagctgttcctggtgct

SEQ ID NO: 10307 - RNA, 21 nt, RNAi-sense strand
uccagcuguuccuggugcuuu

SEQ ID NO: 10308 - RNA, 21 nt, RNAi-antisense strand
agcaccaggaacagcuggauu

SEQ ID NO: 10309 - DNA, 21 bp, Homo sapiens
cagctgttcctggtgctgcag

SEQ ID NO: 10310 - RNA, 21 nt, RNAi-sense strand
gcuguuccuggugcugcaguu

SEQ ID NO: 10311 - RNA, 21 nt, RNAi-antisense strand
cugcagcaccaggaacagcuu

SEQ ID NO: 10312 - DNA, 21 bp, Homo sapiens
cactgcatgtcctacagcaac

SEQ ID NO: 10313 - RNA, 21 nt, RNAi-sense strand
cugcauguccuacagcaacuu

SEQ ID NO: 10314 - RNA, 21 nt, RNAi-antisense strand
guugcuguaggacaugcaguu

SEQ ID NO: 10315 - DNA, 21 bp, Homo sapiens
catgtcctacagcaactccgc

SEQ ID NO: 10316 - RNA, 21 nt, RNAi-sense strand
uguccuacagcaacuccgcuu

SEQ ID NO: 10317 - RNA, 21 nt, RNAi-antisense strand
gcggaguugcuguaggacauu

SEQ ID NO: 10318 - DNA, 21 bp, Homo sapiens
gaactcgctggtcatctacgt

SEQ ID NO: 10319 - RNA, 21 nt, RNAi-sense strand
acucgcuggucaucuacguuu

SEQ ID NO: 10320 - RNA, 21 nt, RNAi-antisense strand
acguagaugaccagcgaguuu

SEQ ID NO: 10321 - DNA, 21 bp, Homo sapiens
gatgcggaccgtgaccaactt

SEQ ID NO: 10322 - RNA, 21 nt, RNAi-sense strand
ugcggaccgugaccaacuuuu

SEQ ID NO: 10323 - RNA, 21 nt, RNAi-antisense strand
aaguuggucacgguccgcauu

SEQ ID NO: 10324 - DNA, 21 bp, Homo sapiens
gaccgtgaccaacttctacat

SEQ ID NO: 10325 - RNA, 21 nt, RNAi-sense strand
ccgugaccaacuucuacauuu

SEQ ID NO: 10326 - RNA, 21 nt, RNAi-antisense strand
auguagaaguuggucacgguu

SEQ ID NO: 10327 - DNA, 21 bp, Homo sapiens
gaccaacttctacatcgccaa

SEQ ID NO: 10328 - RNA, 21 nt, RNAi-sense strand
ccaacuucuacaucgccaauu

SEQ ID NO: 10329 - RNA, 21 nt, RNAi-antisense strand
uuggcgauguagaaguugguu

SEQ ID NO: 10330 - DNA, 21 bp, Homo sapiens
gacgtgaccttcctcctgtgc

SEQ ID NO: 10331 - RNA, 21 nt, RNAi-sense strand
cgugaccuuccuccugugcuu

SEQ ID NO: 10332 - RNA, 21 nt, RNAi-antisense strand
gcacaggaggaaggucacguu

SEQ ID NO: 10333 - DNA, 21 bp, Homo sapiens
gaccttcctcctgtgctgcgt

SEQ ID NO: 10334 - RNA, 21 nt, RNAi-sense strand
ccuuccuccugugcugcguuu

SEQ ID NO: 10335 - RNA, 21 nt, RNAi-antisense strand
acgcagcacaggaggaagguu

SEQ ID NO: 10336 - DNA, 21 bp, Homo sapiens
gacttcatgtgcaagttcgtc

SEQ ID NO: 10337 - RNA, 21 nt, RNAi-sense strand
cuucaugugcaaguucgucuu

SEQ ID NO: 10338 - RNA, 21 nt, RNAi-antisense strand
gacgaacuugcacaugaaguu

SEQ ID NO: 10339 - DNA, 21 bp, Homo sapiens
gagtgtggaccgctggtacgt

SEQ ID NO: 10340 - RNA, 21 nt, RNAi-sense strand
guguggaccgcugguacguuu

SEQ ID NO: 10341 - RNA, 21 nt, RNAi-antisense strand
acguaccagcgguccacacuu

SEQ ID NO: 10342 - DNA, 21 bp, Homo sapiens
tacgtcatctgccgccacaag

SEQ ID NO: 10343 - RNA, 21 nt, RNAi-sense strand
cgucaucugccgccacaaguu

SEQ ID NO: 10344 - RNA, 21 nt, RNAi-antisense strand
cuuguggcggcagaugacguu

SEQ ID NO: 10345 - DNA, 21 bp, Homo sapiens
tacatccagcaggtctcggtg

SEQ ID NO: 10346 - RNA, 21 nt, RNAi-sense strand
cauccagcaggucucgguguu

SEQ ID NO: 10347 - RNA, 21 nt, RNAi-antisense strand
caccgagaccugcuggauguu

SEQ ID NO: 10348 - DNA, 21 bp, Homo sapiens
tacaacctgctggcgctgtac

SEQ ID NO: 10349 - RNA, 21 nt, RNAi-sense strand
caaccugcuggcgcuguacuu

SEQ ID NO: 10350 - RNA, 21 nt, RNAi-antisense strand
guacagcgccagcagguuguu

SEQ ID NO: 10351 - DNA, 21 bp, Homo sapiens
tacagcaactccgcgctgaac

SEQ ID NO: 10352 - RNA, 21 nt, RNAi-sense strand
cagcaacuccgcgcugaacuu

SEQ ID NO: 10353 - RNA, 21 nt, RNAi-antisense strand
guucagcgcggaguugcuguu

SEQ ID NO: 10354 - DNA, 21 bp, Homo sapiens
aacttctacatcgccaacctg

SEQ ID NO: 10355 - RNA, 21 nt, RNAi-sense strand
cuucuacaucgccaaccuguu

SEQ ID NO: 10356 - RNA, 21 nt, RNAi-antisense strand
cagguuggcgauguagaaguu

SEQ ID NO: 10357 - DNA, 21 bp, Homo sapiens
catgtgcaagttcgtcaacta

SEQ ID NO: 10358 - RNA, 21 nt, RNAi-sense strand
ugugcaaguucgucaacuauu

SEQ ID NO: 10359 - RNA, 21 nt, RNAi-antisense strand
uaguugacgaacuugcacauu

SEQ ID NO: 10360 - DNA, 21 bp, Homo sapiens
caagttcgtcaactacatcca

SEQ ID NO: 10361 - RNA, 21 nt, RNAi-sense strand
aguucgucaacuacauccauu

SEQ ID NO: 10362 - RNA, 21 nt, RNAi-antisense strand
uggauguaguugacgaacuuu

SEQ ID NO: 10363 - DNA, 21 bp, Homo sapiens
gacttcatgtgcaagttcgtc

SEQ ID NO: 10364 - RNA, 21 nt, RNAi-sense strand
cuucaugugcaaguucgucuu

SEQ ID NO: 10365 - RNA, 21 nt, RNAi-antisense strand
gacgaacuugcacaugaaguu

SEQ ID NO: 10366 - DNA, 21 bp, Homo sapiens
aagtggtcatcttaagcctca

SEQ ID NO: 10367 - RNA, 21 nt, RNAi-sense strand
guggucaucuuaagccucauu

SEQ ID NO: 10368 - RNA, 21 nt, RNAi-antisense strand
ugaggcuuaagaugaccacuu

SEQ ID NO: 10369 - DNA, 21 bp, Homo sapiens
aagcctcatcctacatctggc

SEQ ID NO: 10370 - RNA, 21 nt, RNAi-sense strand
gccucauccuacaucuggcuu

SEQ ID NO: 10371 - RNA, 21 nt, RNAi-antisense strand
gccagauguaggaugaggcuu

SEQ ID NO: 10372 - DNA, 21 bp, Homo sapiens
aaaggttggtggagaggcagg

SEQ ID NO: 10373 - RNA, 21 nt, RNAi-sense strand
agguugguggagaggcagguu

SEQ ID NO: 10374 - RNA, 21 nt, RNAi-antisense strand
ccugccucuccaccaaccuuu

SEQ ID NO: 10375 - DNA, 21 bp, Homo sapiens
aaggttggtggagaggcaggt

SEQ ID NO: 10376 - RNA, 21 nt, RNAi-sense strand
gguugguggagaggcagguuu

SEQ ID NO: 10377 - RNA, 21 nt, RNAi-antisense strand
accugccucuccaccaaccuu

SEQ ID NO: 10378 - DNA, 21 bp, Homo sapiens
aatgtgctggaatagaggctc

SEQ ID NO: 10379 - RNA, 21 nt, RNAi-sense strand
ugugcuggaauagaggcucuu

SEQ ID NO: 10380 - RNA, 21 nt, RNAi-antisense strand
gagccucuauuccagcacauu

SEQ ID NO: 10381 - DNA, 21 bp, Homo sapiens
aatagaggctcatgttctcta

SEQ ID NO: 10382 - RNA, 21 nt, RNAi-sense strand
uagaggcucauguucucuauu

SEQ ID NO: 10383 - RNA, 21 nt, RNAi-antisense strand
uagagaacaugagccucuauu

SEQ ID NO: 10384 - DNA, 21 bp, Homo sapiens
aaatggcattgtctggaccaa

SEQ ID NO: 10385 - RNA, 21 nt, RNAi-sense strand
auggcauugucuggaccaauu

SEQ ID NO: 10386 - RNA, 21 nt, RNAi-antisense strand
uugguccagacaaugccauuu

SEQ ID NO: 10387 - DNA, 21 bp, Homo sapiens
aatggcattgtctggaccaat

SEQ ID NO: 10388 - RNA, 21 nt, RNAi-sense strand
uggcauugucuggaccaauuu

SEQ ID NO: 10389 - RNA, 21 nt, RNAi-antisense strand
auugguccagacaaugccauu

SEQ ID NO: 10390 - DNA, 21 bp, Homo sapiens
aaggacacacgctataagcta

SEQ ID NO: 10391 - RNA, 21 nt, RNAi-sense strand
ggacacacgcuauaagcuauu

SEQ ID NO: 10392 - RNA, 21 nt, RNAi-antisense strand
uagcuuauagcguguguccuu

SEQ ID NO: 10393 - DNA, 21 bp, Homo sapiens
aaatacagctgtgtctgacag

SEQ ID NO: 10394 - RNA, 21 nt, RNAi-sense strand
auacagcugugucugacaguu

SEQ ID NO: 10395 - RNA, 21 nt, RNAi-antisense strand
cugucagacacagcuguauuu

SEQ ID NO: 10396 - DNA, 21 bp, Homo sapiens
aatacagctgtgtctgacagt

SEQ ID NO: 10397 - RNA, 21 nt, RNAi-sense strand
uacagcugugucugacaguuu

SEQ ID NO: 10398 - RNA, 21 nt, RNAi-antisense strand
acugucagacacagcuguauu

SEQ ID NO: 10399 - DNA, 21 bp, Homo sapiens
aaatcaccgtatcattggaga

SEQ ID NO: 10400 - RNA, 21 nt, RNAi-sense strand
aucaccguaucauuggagauu

SEQ ID NO: 10401 - RNA, 21 nt, RNAi-antisense strand
ucuccaaugauacggugauuu

SEQ ID NO: 10402 - DNA, 21 bp, Homo sapiens
aatcaccgtatcattggagat

SEQ ID NO: 10403 - RNA, 21 nt, RNAi-sense strand
ucaccguaucauuggagauuu

SEQ ID NO: 10404 - RNA, 21 nt, RNAi-antisense strand
aucuccaaugauacggugauu

SEQ ID NO: 10405 - DNA, 21 bp, Homo sapiens
aaggtcacgactactccaatt

SEQ ID NO: 10406 - RNA, 21 nt, RNAi-sense strand
ggucacgacuacuccaauuuu

SEQ ID NO: 10407 - RNA, 21 nt, RNAi-antisense strand
aauuggaguagucgugaccuu

SEQ ID NO: 10408 - DNA, 21 bp, Homo sapiens
aattgtcacaactgttccaac

SEQ ID NO: 10409 - RNA, 21 nt, RNAi-sense strand
uugucacaacuguuccaacuu

SEQ ID NO: 10410 - RNA, 21 nt, RNAi-antisense strand
guuggaacaguugugacaauu

SEQ ID NO: 10411 - DNA, 21 bp, Homo sapiens
aactgttccaaccgtcacgac

SEQ ID NO: 10412 - RNA, 21 nt, RNAi-sense strand
cuguuccaaccgucacgacuu

SEQ ID NO: 10413 - RNA, 21 nt, RNAi-antisense strand
gucgugacgguuggaacaguu

SEQ ID NO: 10414 - DNA, 21 bp, Homo sapiens
aaccgtcacgactgttcgaac

SEQ ID NO: 10415 - RNA, 21 nt, RNAi-sense strand
ccgucacgacuguucgaacuu

SEQ ID NO: 10416 - RNA, 21 nt, RNAi-antisense strand
guucgaacagucgugacgguu

SEQ ID NO: 10417 - DNA, 21 bp, Homo sapiens
aacgagcaccactgttccaac

SEQ ID NO: 10418 - RNA, 21 nt, RNAi-sense strand
cgagcaccacuguuccaacuu

SEQ ID NO: 10419 - RNA, 21 nt, RNAi-antisense strand
guuggaacaguggugcucguu

SEQ ID NO: 10420 - DNA, 21 bp, Homo sapiens
aacgacaacgactgttccaac

SEQ ID NO: 10421 - RNA, 21 nt, RNAi-sense strand
cgacaacgacuguuccaacuu

SEQ ID NO: 10422 - RNA, 21 nt, RNAi-antisense strand
guuggaacagucguugucguu

SEQ ID NO: 10423 - DNA, 21 bp, Homo sapiens
aacgactgttccaacgacaac

SEQ ID NO: 10424 - RNA, 21 nt, RNAi-sense strand
cgacuguuccaacgacaacuu

SEQ ID NO: 10425 - RNA, 21 nt, RNAi-antisense strand
guugucguuggaacagucguu

SEQ ID NO: 10426 - DNA, 21 bp, Homo sapiens
aacgacaactgttccaacaac

SEQ ID NO: 10427 - RNA, 21 nt, RNAi-sense strand
cgacaacuguuccaacaacuu

SEQ ID NO: 10428 - RNA, 21 nt, RNAi-antisense strand
guuguuggaacaguugucguu

SEQ ID NO: 10429 - DNA, 21 bp, Homo sapiens
aactgttccaacaacaatgag

SEQ ID NO: 10430 - RNA, 21 nt, RNAi-sense strand
cuguuccaacaacaaugaguu

SEQ ID NO: 10431 - RNA, 21 nt, RNAi-antisense strand
cucauuguuguuggaacaguu

SEQ ID NO: 10432 - DNA, 21 bp, Homo sapiens
aacaacaatgagcattccaac

SEQ ID NO: 10433 - RNA, 21 nt, RNAi-sense strand
caacaaugagcauuccaacuu

SEQ ID NO: 10434 - RNA, 21 nt, RNAi-antisense strand
guuggaaugcucauuguuguu

SEQ ID NO: 10435 - DNA, 21 bp, Homo sapiens
aacaatgagcattccaacgac

SEQ ID NO: 10436 - RNA, 21 nt, RNAi-sense strand
caaugagcauuccaacgacuu

SEQ ID NO: 10437 - RNA, 21 nt, RNAi-antisense strand
gucguuggaaugcucauuguu

SEQ ID NO: 10438 - DNA, 21 bp, Homo sapiens
aatgagcattccaacgacaac

SEQ ID NO: 10439 - RNA, 21 nt, RNAi-sense strand
ugagcauuccaacgacaacuu

SEQ ID NO: 10440 - RNA, 21 nt, RNAi-antisense strand
guugucguuggaaugcucauu

SEQ ID NO: 10441 - DNA, 21 bp, Homo sapiens
aacgacaacgactgttccgac

SEQ ID NO: 10442 - RNA, 21 nt, RNAi-sense strand
cgacaacgacuguuccgacuu

SEQ ID NO: 10443 - RNA, 21 nt, RNAi-antisense strand
gucggaacagucguugucguu

SEQ ID NO: 10444 - DNA, 21 bp, Homo sapiens
aacgactgttccgacgacaat

SEQ ID NO: 10445 - RNA, 21 nt, RNAi-sense strand
cgacuguuccgacgacaauuu

SEQ ID NO: 10446 - RNA, 21 nt, RNAi-antisense strand
auugucgucggaacagucguu

SEQ ID NO: 10447 - DNA, 21 bp, Homo sapiens
aatgactgtttcaacgacaac

SEQ ID NO: 10448 - RNA, 21 nt, RNAi-sense strand
ugacuguuucaacgacaacuu

SEQ ID NO: 10449 - RNA, 21 nt, RNAi-antisense strand
guugucguugaaacagucauu

SEQ ID NO: 10450 - DNA, 21 bp, Homo sapiens
aacgacaacgagcgttccaac

SEQ ID NO: 10451 - RNA, 21 nt, RNAi-sense strand
cgacaacgagcguuccaacuu

SEQ ID NO: 10452 - RNA, 21 nt, RNAi-antisense strand
guuggaacgcucguugucguu

SEQ ID NO: 10453 - DNA, 21 bp, Homo sapiens
aacgagcgttccaacgacaac

SEQ ID NO: 10454 - RNA, 21 nt, RNAi-sense strand
cgagcguuccaacgacaacuu

SEQ ID NO: 10455 - RNA, 21 nt, RNAi-antisense strand
guugucguuggaacgcucguu

SEQ ID NO: 10456 - DNA, 21 bp, Homo sapiens
aacgacaacgagcattccaac

SEQ ID NO: 10457 - RNA, 21 nt, RNAi-sense strand
cgacaacgagcauuccaacuu

SEQ ID NO: 10458 - RNA, 21 nt, RNAi-antisense strand
guuggaaugcucguugucguu

SEQ ID NO: 10459 - DNA, 21 bp, Homo sapiens
aacgagcattccaacaacaac

SEQ ID NO: 10460 - RNA, 21 nt, RNAi-sense strand
cgagcauuccaacaacaacuu

SEQ ID NO: 10461 - RNA, 21 nt, RNAi-antisense strand
guuguuguuggaaugcucguu

SEQ ID NO: 10462 - DNA, 21 bp, Homo sapiens
aacaacaacaagtgttccagt

SEQ ID NO: 10463 - RNA, 21 nt, RNAi-sense strand
caacaacaaguguuccaguuu

SEQ ID NO: 10464 - RNA, 21 nt, RNAi-antisense strand
acuggaacacuuguuguuguu

SEQ ID NO: 10465 - DNA, 21 bp, Homo sapiens
aacaacaagtgttccagtgac

SEQ ID NO: 10466 - RNA, 21 nt, RNAi-sense strand
caacaaguguuccagugacuu

SEQ ID NO: 10467 - RNA, 21 nt, RNAi-antisense strand
gucacuggaacacuuguuguu

SEQ ID NO: 10468 - DNA, 21 bp, Homo sapiens
aacaagtgttccagtgacaac

SEQ ID NO: 10469 - RNA, 21 nt, RNAi-sense strand
caaguguuccagugacaacuu

SEQ ID NO: 10470 - RNA, 21 nt, RNAi-antisense strand
guugucacuggaacacuuguu

SEQ ID NO: 10471 - DNA, 21 bp, Homo sapiens
aagtgttccagtgacaacaac

SEQ ID NO: 10472 - RNA, 21 nt, RNAi-sense strand
guguuccagugacaacaacuu

SEQ ID NO: 10473 - RNA, 21 nt, RNAi-antisense strand
guuguugucacuggaacacuu

SEQ ID NO: 10474 - DNA, 21 bp, Homo sapiens
aacaacggtctctacctttgt

SEQ ID NO: 10475 - RNA, 21 nt, RNAi-sense strand
caacggucucuaccuuuguuu

SEQ ID NO: 10476 - RNA, 21 nt, RNAi-antisense strand
acaaagguagagaccguuguu

SEQ ID NO: 10477 - DNA, 21 bp, Homo sapiens
aacggtctctacctttgttcc

SEQ ID NO: 10478 - RNA, 21 nt, RNAi-sense strand
cggucucuaccuuuguuccuu

SEQ ID NO: 10479 - RNA, 21 nt, RNAi-antisense strand
ggaacaaagguagagaccguu

SEQ ID NO: 10480 - DNA, 21 bp, Homo sapiens
aaccatgaaccagtagccact

SEQ ID NO: 10481 - RNA, 21 nt, RNAi-sense strand
ccaugaaccaguagccacuuu

SEQ ID NO: 10482 - RNA, 21 nt, RNAi-antisense strand
aguggcuacugguucaugguu

SEQ ID NO: 10483 - DNA, 21 bp, Homo sapiens
aaccagtagccacttcaccat

SEQ ID NO: 10484 - RNA, 21 nt, RNAi-sense strand
ccaguagccacuucaccauuu

SEQ ID NO: 10485 - RNA, 21 nt, RNAi-antisense strand
auggugaaguggcuacugguu

SEQ ID NO: 10486 - DNA, 21 bp, Homo sapiens
aatgacaccgtgacagagtct

SEQ ID NO: 10487 - RNA, 21 nt, RNAi-sense strand
ugacaccgugacagagucuuu

SEQ ID NO: 10488 - RNA, 21 nt, RNAi-antisense strand
agacucugucacggugucauu

SEQ ID NO: 10489 - DNA, 21 bp, Homo sapiens
aacaatcaaactcaactgttc

SEQ ID NO: 10490 - RNA, 21 nt, RNAi-sense strand
caaucaaacucaacuguucuu

SEQ ID NO: 10491 - RNA, 21 nt, RNAi-antisense strand
gaacaguugaguuugauuguu

SEQ ID NO: 10492 - DNA, 21 bp, Homo sapiens
aatcaaactcaactgttccta

SEQ ID NO: 10493 - RNA, 21 nt, RNAi-sense strand
ucaaacucaacuguuccuauu

SEQ ID NO: 10494 - RNA, 21 nt, RNAi-antisense strand
uaggaacaguugaguuugauu

SEQ ID NO: 10495 - DNA, 21 bp, Homo sapiens
aaactcaactgttcctagaac

SEQ ID NO: 10496 - RNA, 21 nt, RNAi-sense strand
acucaacuguuccuagaacuu

SEQ ID NO: 10497 - RNA, 21 nt, RNAi-antisense strand
guucuaggaacaguugaguuu

SEQ ID NO: 10498 - DNA, 21 bp, Homo sapiens
aactcaactgttcctagaaca

SEQ ID NO: 10499 - RNA, 21 nt, RNAi-sense strand
cucaacuguuccuagaacauu

SEQ ID NO: 10500 - RNA, 21 nt, RNAi-antisense strand
uguucuaggaacaguugaguu

SEQ ID NO: 10501 - DNA, 21 bp, Homo sapiens
aactgttcctagaacatagtc

SEQ ID NO: 10502 - RNA, 21 nt, RNAi-sense strand
cuguuccuagaacauagucuu

SEQ ID NO: 10503 - RNA, 21 nt, RNAi-antisense strand
gacuauguucuaggaacaguu

SEQ ID NO: 10504 - DNA, 21 bp, Homo sapiens
aacatagtctactgacggcca

SEQ ID NO: 10505 - RNA, 21 nt, RNAi-sense strand
cauagucuacugacggccauu

SEQ ID NO: 10506 - RNA, 21 nt, RNAi-antisense strand
uggccgucaguagacuauguu

SEQ ID NO: 10507 - DNA, 21 bp, Homo sapiens
aaaggaatctatgctggagtc

SEQ ID NO: 10508 - RNA, 21 nt, RNAi-sense strand
aggaaucuaugcuggagucuu

SEQ ID NO: 10509 - RNA, 21 nt, RNAi-antisense strand
gacuccagcauagauuccuuu

SEQ ID NO: 10510 - DNA, 21 bp, Homo sapiens
aaggaatctatgctggagtct

SEQ ID NO: 10511 - RNA, 21 nt, RNAi-sense strand
ggaaucuaugcuggagucuuu

SEQ ID NO: 10512 - RNA, 21 nt, RNAi-antisense strand
agacuccagcauagauuccuu

SEQ ID NO: 10513 - DNA, 21 bp, Homo sapiens
aatctatgctggagtctgtat

SEQ ID NO: 10514 - RNA, 21 nt, RNAi-sense strand
ucuaugcuggagucuguauuu

SEQ ID NO: 10515 - RNA, 21 nt, RNAi-antisense strand
auacagacuccagcauagauu

SEQ ID NO: 10516 - DNA, 21 bp, Homo sapiens
aaaggaggttcaacaactaag

SEQ ID NO: 10517 - RNA, 21 nt, RNAi-sense strand
aggagguucaacaacuaaguu

SEQ ID NO: 10518 - RNA, 21 nt, RNAi-antisense strand
cuuaguuguugaaccuccuuu

SEQ ID NO: 10519 - DNA, 21 bp, Homo sapiens
aaggaggttcaacaactaagt

SEQ ID NO: 10520 - RNA, 21 nt, RNAi-sense strand
ggagguucaacaacuaaguuu

SEQ ID NO: 10521 - RNA, 21 nt, RNAi-antisense strand
acuuaguuguugaaccuccuu

SEQ ID NO: 10522 - DNA, 21 bp, Homo sapiens
aagtgtttcatttagcagcct

SEQ ID NO: 10523 - RNA, 21 nt, RNAi-sense strand
guguuucauuuagcagccuuu

SEQ ID NO: 10524 - RNA, 21 nt, RNAi-antisense strand
aggcugcuaaaugaaacacuu

SEQ ID NO: 10525 - DNA, 21 bp, Homo sapiens
aaaggaagtccaagcagaaga

SEQ ID NO: 10526 - RNA, 21 nt, RNAi-sense strand
aggaaguccaagcagaagauu

SEQ ID NO: 10527 - RNA, 21 nt, RNAi-antisense strand
ucuucugcuuggacuuccuuu

SEQ ID NO: 10528 - DNA, 21 bp, Homo sapiens
aaggaagtccaagcagaagac

SEQ ID NO: 10529 - RNA, 21 nt, RNAi-sense strand
ggaaguccaagcagaagacuu

SEQ ID NO: 10530 - RNA, 21 nt, RNAi-antisense strand
gucuucugcuuggacuuccuu

SEQ ID NO: 10531 - DNA, 21 bp, Homo sapiens
aagtccaagcagaagacaata

SEQ ID NO: 10532 - RNA, 21 nt, RNAi-sense strand
guccaagcagaagacaauauu

SEQ ID NO: 10533 - RNA, 21 nt, RNAi-antisense strand
uauugucuucugcuuggacuu

SEQ ID NO: 10534 - DNA, 21 bp, Homo sapiens
aagcagaagacaatatctaca

SEQ ID NO: 10535 - RNA, 21 nt, RNAi-sense strand
gcagaagacaauaucuacauu

SEQ ID NO: 10536 - RNA, 21 nt, RNAi-antisense strand
uguagauauugucuucugcuu

SEQ ID NO: 10537 - DNA, 21 bp, Homo sapiens
aatagtctttatgccacggac

SEQ ID NO: 10538 - RNA, 21 nt, RNAi-sense strand
uagucuuuaugccacggacuu

SEQ ID NO: 10539 - RNA, 21 nt, RNAi-antisense strand
guccguggcauaaagacuauu

SEQ ID NO: 10540 - DNA, 21 bp, Homo sapiens
aagactgaacaggtatcagca

SEQ ID NO: 10541 - RNA, 21 nt, RNAi-sense strand
gacugaacagguaucagcauu

SEQ ID NO: 10542 - RNA, 21 nt, RNAi-antisense strand
ugcugauaccuguucagucuu

SEQ ID NO: 10543 - DNA, 21 bp, Homo sapiens
aacaggtatcagcacatcaga

SEQ ID NO: 10544 - RNA, 21 nt, RNAi-sense strand
cagguaucagcacaucagauu

SEQ ID NO: 10545 - RNA, 21 nt, RNAi-antisense strand
ucugaugugcugauaccuguu

SEQ ID NO: 10546 - DNA, 21 bp, Homo sapiens
aaactgtgtatagtcaacctc

SEQ ID NO: 10547 - RNA, 21 nt, RNAi-sense strand
acuguguauagucaaccucuu

SEQ ID NO: 10548 - RNA, 21 nt, RNAi-antisense strand
gagguugacuauacacaguuu

SEQ ID NO: 10549 - DNA, 21 bp, Homo sapiens
aactgtgtatagtcaacctca

SEQ ID NO: 10550 - RNA, 21 nt, RNAi-sense strand
cuguguauagucaaccucauu

SEQ ID NO: 10551 - RNA, 21 nt, RNAi-antisense strand
ugagguugacuauacacaguu

SEQ ID NO: 10552 - DNA, 21 bp, Homo sapiens
aacctcatcattaatgtagtc

SEQ ID NO: 10553 - RNA, 21 nt, RNAi-sense strand
ccucaucauuaauguagucuu

SEQ ID NO: 10554 - RNA, 21 nt, RNAi-antisense strand
gacuacauuaaugaugagguu

SEQ ID NO: 10555 - DNA, 21 bp, Homo sapiens
aaactggctcaatccttctga

SEQ ID NO: 10556 - RNA, 21 nt, RNAi-sense strand
acuggcucaauccuucugauu

SEQ ID NO: 10557 - RNA, 21 nt, RNAi-antisense strand
ucagaaggauugagccaguuu

SEQ ID NO: 10558 - DNA, 21 bp, Homo sapiens
aactggctcaatccttctgat

SEQ ID NO: 10559 - RNA, 21 nt, RNAi-sense strand
cuggcucaauccuucugauuu

SEQ ID NO: 10560 - RNA, 21 nt, RNAi-antisense strand
aucagaaggauugagccaguu

SEQ ID NO: 10561 - DNA, 21 bp, Homo sapiens
aatccttctgatcattgcaga

SEQ ID NO: 10562 - RNA, 21 nt, RNAi-sense strand
uccuucugaucauugcagauu

SEQ ID NO: 10563 - RNA, 21 nt, RNAi-antisense strand
ucugcaaugaucagaaggauu

SEQ ID NO: 10564 - DNA, 21 bp, Homo sapiens
caagtggtcatcttaagcctc

SEQ ID NO: 10565 - RNA, 21 nt, RNAi-sense strand
aguggucaucuuaagccucuu

SEQ ID NO: 10566 - RNA, 21 nt, RNAi-antisense strand
gaggcuuaagaugaccacuuu

SEQ ID NO: 10567 - DNA, 21 bp, Homo sapiens
catcttaagcctcatcctaca

SEQ ID NO: 10568 - RNA, 21 nt, RNAi-sense strand
ucuuaagccucauccuacauu

SEQ ID NO: 10569 - RNA, 21 nt, RNAi-antisense strand
uguaggaugaggcuuaagauu

SEQ ID NO: 10570 - DNA, 21 bp, Homo sapiens
catcctacatctggcagattc

SEQ ID NO: 10571 - RNA, 21 nt, RNAi-sense strand
uccuacaucuggcagauucuu

SEQ ID NO: 10572 - RNA, 21 nt, RNAi-antisense strand
gaaucugccagauguaggauu

SEQ ID NO: 10573 - DNA, 21 bp, Homo sapiens
catctggcagattctgtagct

SEQ ID NO: 10574 - RNA, 21 nt, RNAi-sense strand
ucuggcagauucuguagcuuu

SEQ ID NO: 10575 - RNA, 21 nt, RNAi-antisense strand
agcuacagaaucugccagauu

SEQ ID NO: 10576 - DNA, 21 bp, Homo sapiens
cagattctgtagctggttctg

SEQ ID NO: 10577 - RNA, 21 nt, RNAi-sense strand
gauucuguagcugguucuguu

SEQ ID NO: 10578 - RNA, 21 nt, RNAi-antisense strand
cagaaccagcuacagaaucuu

SEQ ID NO: 10579 - DNA, 21 bp, Homo sapiens
caggtccatctgtcacactac

SEQ ID NO: 10580 - RNA, 21 nt, RNAi-sense strand
gguccaucugucacacuacuu

SEQ ID NO: 10581 - RNA, 21 nt, RNAi-antisense strand
guagugugacagauggaccuu

SEQ ID NO: 10582 - DNA, 21 bp, Homo sapiens
cactacagtggagctgtcaca

SEQ ID NO: 10583 - RNA, 21 nt, RNAi-sense strand
cuacaguggagcugucacauu

SEQ ID NO: 10584 - RNA, 21 nt, RNAi-antisense strand
ugugacagcuccacuguaguu

SEQ ID NO: 10585 - DNA, 21 bp, Homo sapiens
cagtggagctgtcacatcaat

SEQ ID NO: 10586 - RNA, 21 nt, RNAi-sense strand
guggagcugucacaucaauuu

SEQ ID NO: 10587 - RNA, 21 nt, RNAi-antisense strand
auugaugugacagcuccacuu

SEQ ID NO: 10588 - DNA, 21 bp, Homo sapiens
cacatcaatgtgctggaatag

SEQ ID NO: 10589 - RNA, 21 nt, RNAi-sense strand
caucaaugugcuggaauaguu

SEQ ID NO: 10590 - RNA, 21 nt, RNAi-antisense strand
cuauuccagcacauugauguu

SEQ ID NO: 10591 - DNA, 21 bp, Homo sapiens
catcaatgtgctggaatagag

SEQ ID NO: 10592 - RNA, 21 nt, RNAi-sense strand
ucaaugugcuggaauagaguu

SEQ ID NO: 10593 - RNA, 21 nt, RNAi-antisense strand
cucuauuccagcacauugauu

SEQ ID NO: 10594 - DNA, 21 bp, Homo sapiens
caatgtgctggaatagaggct

SEQ ID NO: 10595 - RNA, 21 nt, RNAi-sense strand
augugcuggaauagaggcuuu

SEQ ID NO: 10596 - RNA, 21 nt, RNAi-antisense strand
agccucuauuccagcacauuu

SEQ ID NO: 10597 - DNA, 21 bp, Homo sapiens
catgttctctattcacatgcc

SEQ ID NO: 10598 - RNA, 21 nt, RNAi-sense strand
uguucucuauucacaugccuu

SEQ ID NO: 10599 - RNA, 21 nt, RNAi-antisense strand
ggcaugugaauagagaacauu

SEQ ID NO: 10600 - DNA, 21 bp, Homo sapiens
cattgtctggaccaatggaac

SEQ ID NO: 10601 - RNA, 21 nt, RNAi-sense strand
uugucuggaccaauggaacuu

SEQ ID NO: 10602 - RNA, 21 nt, RNAi-antisense strand
guuccauugguccagacaauu

SEQ ID NO: 10603 - DNA, 21 bp, Homo sapiens
cacgtcacctatcggaaggac

SEQ ID NO: 10604 - RNA, 21 nt, RNAi-sense strand
cgucaccuaucggaaggacuu

SEQ ID NO: 10605 - RNA, 21 nt, RNAi-antisense strand
guccuuccgauaggugacguu

SEQ ID NO: 10606 - DNA, 21 bp, Homo sapiens
cacctatcggaaggacacacg

SEQ ID NO: 10607 - RNA, 21 nt, RNAi-sense strand
ccuaucggaaggacacacguu

SEQ ID NO: 10608 - RNA, 21 nt, RNAi-antisense strand
cguguguccuuccgauagguu

SEQ ID NO: 10609 - DNA, 21 bp, Homo sapiens
cagctgtgtctgacagtggcg

SEQ ID NO: 10610 - RNA, 21 nt, RNAi-sense strand
gcugugucugacaguggcguu

SEQ ID NO: 10611 - RNA, 21 nt, RNAi-antisense strand
cgccacugucagacacagcuu

SEQ ID NO: 10612 - DNA, 21 bp, Homo sapiens
cagtggcgtatattgttgccg

SEQ ID NO: 10613 - RNA, 21 nt, RNAi-sense strand
guggcguauauuguugccguu

SEQ ID NO: 10614 - RNA, 21 nt, RNAi-antisense strand
cggcaacaauauacgccacuu

SEQ ID NO: 10615 - DNA, 21 bp, Homo sapiens
caccgtatcattggagattgt

SEQ ID NO: 10616 - RNA, 21 nt, RNAi-sense strand
ccguaucauuggagauuguuu

SEQ ID NO: 10617 - RNA, 21 nt, RNAi-antisense strand
acaaucuccaaugauacgguu

SEQ ID NO: 10618 - DNA, 21 bp, Homo sapiens
caaggtcacgactactccaat

SEQ ID NO: 10619 - RNA, 21 nt, RNAi-sense strand
aggucacgacuacuccaauuu

SEQ ID NO: 10620 - RNA, 21 nt, RNAi-antisense strand
auuggaguagucgugaccuuu

SEQ ID NO: 10621 - DNA, 21 bp, Homo sapiens
cacgactactccaattgtcac

SEQ ID NO: 10622 - RNA, 21 nt, RNAi-sense strand
cgacuacuccaauugucacuu

SEQ ID NO: 10623 - RNA, 21 nt, RNAi-antisense strand
gugacaauuggaguagucguu

SEQ ID NO: 10624 - DNA, 21 bp, Homo sapiens
caattgtcacaactgttccaa

SEQ ID NO: 10625 - RNA, 21 nt, RNAi-sense strand
auugucacaacuguuccaauu

SEQ ID NO: 10626 - RNA, 21 nt, RNAi-antisense strand
uuggaacaguugugacaauuu

SEQ ID NO: 10627 - DNA, 21 bp, Homo sapiens
cacaactgttccaaccgtcac

SEQ ID NO: 10628 - RNA, 21 nt, RNAi-sense strand
caacuguuccaaccgucacuu

SEQ ID NO: 10629 - RNA, 21 nt, RNAi-antisense strand
gugacgguuggaacaguuguu

SEQ ID NO: 10630 - DNA, 21 bp, Homo sapiens
caactgttccaaccgtcacga

SEQ ID NO: 10631 - RNA, 21 nt, RNAi-sense strand
acuguuccaaccgucacgauu

SEQ ID NO: 10632 - RNA, 21 nt, RNAi-antisense strand
ucgugacgguuggaacaguuu

SEQ ID NO: 10633 - DNA, 21 bp, Homo sapiens
caaccgtcacgactgttcgaa

SEQ ID NO: 10634 - RNA, 21 nt, RNAi-sense strand
accgucacgacuguucgaauu

SEQ ID NO: 10635 - RNA, 21 nt, RNAi-antisense strand
uucgaacagucgugacgguuu

SEQ ID NO: 10636 - DNA, 21 bp, Homo sapiens
cacgactgttcgaacgagcac

SEQ ID NO: 10637 - RNA, 21 nt, RNAi-sense strand
cgacuguucgaacgagcacuu

SEQ ID NO: 10638 - RNA, 21 nt, RNAi-antisense strand
gugcucguucgaacagucguu

SEQ ID NO: 10639 - DNA, 21 bp, Homo sapiens
caccactgttccaacgacaac

SEQ ID NO: 10640 - RNA, 21 nt, RNAi-sense strand
ccacuguuccaacgacaacuu

SEQ ID NO: 10641 - RNA, 21 nt, RNAi-antisense strand
guugucguuggaacagugguu

SEQ ID NO: 10642 - DNA, 21 bp, Homo sapiens
cactgttccaacgacaacgac

SEQ ID NO: 10643 - RNA, 21 nt, RNAi-sense strand
cuguuccaacgacaacgacuu

SEQ ID NO: 10644 - RNA, 21 nt, RNAi-antisense strand
gucguugucguuggaacaguu

SEQ ID NO: 10645 - DNA, 21 bp, Homo sapiens
caacgacaacgactgttccaa

SEQ ID NO: 10646 - RNA, 21 nt, RNAi-sense strand
acgacaacgacuguuccaauu

SEQ ID NO: 10647 - RNA, 21 nt, RNAi-antisense strand
uuggaacagucguugucguuu

SEQ ID NO: 10648 - DNA, 21 bp, Homo sapiens
caacgactgttccaacgacaa

SEQ ID NO: 10649 - RNA, 21 nt, RNAi-sense strand
acgacuguuccaacgacaauu

SEQ ID NO: 10650 - RNA, 21 nt, RNAi-antisense strand
uugucguuggaacagucguuu

SEQ ID NO: 10651 - DNA, 21 bp, Homo sapiens
caacgacaactgttccaacaa

SEQ ID NO: 10652 - RNA, 21 nt, RNAi-sense strand
acgacaacuguuccaacaauu

SEQ ID NO: 10653 - RNA, 21 nt, RNAi-antisense strand
uuguuggaacaguugucguuu

SEQ ID NO: 10654 - DNA, 21 bp, Homo sapiens
caactgttccaacaacaatga

SEQ ID NO: 10655 - RNA, 21 nt, RNAi-sense strand
acuguuccaacaacaaugauu

SEQ ID NO: 10656 - RNA, 21 nt, RNAi-antisense strand
ucauuguuguuggaacaguuu

SEQ ID NO: 10657 - DNA, 21 bp, Homo sapiens
caacaacaatgagcattccaa

SEQ ID NO: 10658 - RNA, 21 nt, RNAi-sense strand
acaacaaugagcauuccaauu

SEQ ID NO: 10659 - RNA, 21 nt, RNAi-antisense strand
uuggaaugcucauuguuguuu

SEQ ID NO: 10660 - DNA, 21 bp, Homo sapiens
caacaatgagcattccaacga

SEQ ID NO: 10661 - RNA, 21 nt, RNAi-sense strand
acaaugagcauuccaacgauu

SEQ ID NO: 10662 - RNA, 21 nt, RNAi-antisense strand
ucguuggaaugcucauuguuu

SEQ ID NO: 10663 - DNA, 21 bp, Homo sapiens
caatgagcattccaacgacaa

SEQ ID NO: 10664 - RNA, 21 nt, RNAi-sense strand
augagcauuccaacgacaauu

SEQ ID NO: 10665 - RNA, 21 nt, RNAi-antisense strand
uugucguuggaaugcucauuu

SEQ ID NO: 10666 - DNA, 21 bp, Homo sapiens
cattccaacgacaacgactgt

SEQ ID NO: 10667 - RNA, 21 nt, RNAi-sense strand
uuccaacgacaacgacuguuu

SEQ ID NO: 10668 - RNA, 21 nt, RNAi-antisense strand
acagucguugucguuggaauu

SEQ ID NO: 10669 - DNA, 21 bp, Homo sapiens
caacgacaacgactgttccga

SEQ ID NO: 10670 - RNA, 21 nt, RNAi-sense strand
acgacaacgacuguuccgauu

SEQ ID NO: 10671 - RNA, 21 nt, RNAi-antisense strand
ucggaacagucguugucguuu

SEQ ID NO: 10672 - DNA, 21 bp, Homo sapiens
caacgactgttccgacgacaa

SEQ ID NO: 10673 - RNA, 21 nt, RNAi-sense strand
acgacuguuccgacgacaauu

SEQ ID NO: 10674 - RNA, 21 nt, RNAi-antisense strand
uugucgucggaacagucguuu

SEQ ID NO: 10675 - DNA, 21 bp, Homo sapiens
caatgactgtttcaacgacaa

SEQ ID NO: 10676 - RNA, 21 nt, RNAi-sense strand
augacuguuucaacgacaauu

SEQ ID NO: 10677 - RNA, 21 nt, RNAi-antisense strand
uugucguugaaacagucauuu

SEQ ID NO: 10678 - DNA, 21 bp, Homo sapiens
caacgacaacgagcgttccaa

SEQ ID NO: 10679 - RNA, 21 nt, RNAi-sense strand
acgacaacgagcguuccaauu

SEQ ID NO: 10680 - RNA, 21 nt, RNAi-antisense strand
uuggaacgcucguugucguuu

SEQ ID NO: 10681 - DNA, 21 bp, Homo sapiens
caacgagcgttccaacgacaa

SEQ ID NO: 10682 - RNA, 21 nt, RNAi-sense strand
acgagcguuccaacgacaauu

SEQ ID NO: 10683 - RNA, 21 nt, RNAi-antisense strand
uugucguuggaacgcucguuu

SEQ ID NO: 10684 - DNA, 21 bp, Homo sapiens
caacgacaacgagcattccaa

SEQ ID NO: 10685 - RNA, 21 nt, RNAi-sense strand
acgacaacgagcauuccaauu

SEQ ID NO: 10686 - RNA, 21 nt, RNAi-antisense strand
uuggaaugcucguugucguuu

SEQ ID NO: 10687 - DNA, 21 bp, Homo sapiens
caacgagcattccaacaacaa

SEQ ID NO: 10688 - RNA, 21 nt, RNAi-sense strand
acgagcauuccaacaacaauu

SEQ ID NO: 10689 - RNA, 21 nt, RNAi-antisense strand
uuguuguuggaaugcucguuu

SEQ ID NO: 10690 - DNA, 21 bp, Homo sapiens
cattccaacaacaacaagtgt

SEQ ID NO: 10691 - RNA, 21 nt, RNAi-sense strand
uuccaacaacaacaaguguuu

SEQ ID NO: 10692 - RNA, 21 nt, RNAi-antisense strand
acacuuguuguuguuggaauu

SEQ ID NO: 10693 - DNA, 21 bp, Homo sapiens
caacaacaacaagtgttccag

SEQ ID NO: 10694 - RNA, 21 nt, RNAi-sense strand
acaacaacaaguguuccaguu

SEQ ID NO: 10695 - RNA, 21 nt, RNAi-antisense strand
cuggaacacuuguuguuguuu

SEQ ID NO: 10696 - DNA, 21 bp, Homo sapiens
caacaacaagtgttccagtga

SEQ ID NO: 10697 - RNA, 21 nt, RNAi-sense strand
acaacaaguguuccagugauu

SEQ ID NO: 10698 - RNA, 21 nt, RNAi-antisense strand
ucacuggaacacuuguuguuu

SEQ ID NO: 10699 - DNA, 21 bp, Homo sapiens
caacaagtgttccagtgacaa

SEQ ID NO: 10700 - RNA, 21 nt, RNAi-sense strand
acaaguguuccagugacaauu

SEQ ID NO: 10701 - RNA, 21 nt, RNAi-antisense strand
uugucacuggaacacuuguuu

SEQ ID NO: 10702 - DNA, 21 bp, Homo sapiens
caagtgttccagtgacaacaa

SEQ ID NO: 10703 - RNA, 21 nt, RNAi-sense strand
aguguuccagugacaacaauu

SEQ ID NO: 10704 - RNA, 21 nt, RNAi-antisense strand
uuguugucacuggaacacuuu

SEQ ID NO: 10705 - DNA, 21 bp, Homo sapiens
cagtgacaacaacggtctcta

SEQ ID NO: 10706 - RNA, 21 nt, RNAi-sense strand
gugacaacaacggucucuauu

SEQ ID NO: 10707 - RNA, 21 nt, RNAi-antisense strand
uagagaccguuguugucacuu

SEQ ID NO: 10708 - DNA, 21 bp, Homo sapiens
caacaacggtctctacctttg

SEQ ID NO: 10709 - RNA, 21 nt, RNAi-sense strand
acaacggucucuaccuuuguu

SEQ ID NO: 10710 - RNA, 21 nt, RNAi-antisense strand
caaagguagagaccguuguuu

SEQ ID NO: 10711 - DNA, 21 bp, Homo sapiens
caacggtctctacctttgttc

SEQ ID NO: 10712 - RNA, 21 nt, RNAi-sense strand
acggucucuaccuuuguucuu

SEQ ID NO: 10713 - RNA, 21 nt, RNAi-antisense strand
gaacaaagguagagaccguuu

SEQ ID NO: 10714 - DNA, 21 bp, Homo sapiens
caggcagaaccatgaaccagt

SEQ ID NO: 10715 - RNA, 21 nt, RNAi-sense strand
ggcagaaccaugaaccaguuu

SEQ ID NO: 10716 - RNA, 21 nt, RNAi-antisense strand
acugguucaugguucugccuu

SEQ ID NO: 10717 - DNA, 21 bp, Homo sapiens
cagaaccatgaaccagtagcc

SEQ ID NO: 10718 - RNA, 21 nt, RNAi-sense strand
gaaccaugaaccaguagccuu

SEQ ID NO: 10719 - RNA, 21 nt, RNAi-antisense strand
ggcuacugguucaugguucuu

SEQ ID NO: 10720 - DNA, 21 bp, Homo sapiens
catgaaccagtagccacttca

SEQ ID NO: 10721 - RNA, 21 nt, RNAi-sense strand
ugaaccaguagccacuucauu

SEQ ID NO: 10722 - RNA, 21 nt, RNAi-antisense strand
ugaaguggcuacugguucauu

SEQ ID NO: 10723 - DNA, 21 bp, Homo sapiens
cagtagccacttcaccatctt

SEQ ID NO: 10724 - RNA, 21 nt, RNAi-sense strand
guagccacuucaccaucuuuu

SEQ ID NO: 10725 - RNA, 21 nt, RNAi-antisense strand
aagauggugaaguggcuacuu

SEQ ID NO: 10726 - DNA, 21 bp, Homo sapiens
cacttcaccatcttcacctca

SEQ ID NO: 10727 - RNA, 21 nt, RNAi-sense strand
cuucaccaucuucaccucauu

SEQ ID NO: 10728 - RNA, 21 nt, RNAi-antisense strand
ugaggugaagauggugaaguu

SEQ ID NO: 10729 - DNA, 21 bp, Homo sapiens
caccatcttcacctcagccag

SEQ ID NO: 10730 - RNA, 21 nt, RNAi-sense strand
ccaucuucaccucagccaguu

SEQ ID NO: 10731 - RNA, 21 nt, RNAi-antisense strand
cuggcugaggugaagaugguu

SEQ ID NO: 10732 - DNA, 21 bp, Homo sapiens
catcttcacctcagccagcag

SEQ ID NO: 10733 - RNA, 21 nt, RNAi-sense strand
ucuucaccucagccagcaguu

SEQ ID NO: 10734 - RNA, 21 nt, RNAi-antisense strand
cugcuggcugaggugaagauu

SEQ ID NO: 10735 - DNA, 21 bp, Homo sapiens
caccagctcaccattgtactc

SEQ ID NO: 10736 - RNA, 21 nt, RNAi-sense strand
ccagcucaccauuguacucuu

SEQ ID NO: 10737 - RNA, 21 nt, RNAi-antisense strand
gaguacaauggugagcugguu

SEQ ID NO: 10738 - DNA, 21 bp, Homo sapiens
cagctcaccattgtactctta

SEQ ID NO: 10739 - RNA, 21 nt, RNAi-sense strand
gcucaccauuguacucuuauu

SEQ ID NO: 10740 - RNA, 21 nt, RNAi-antisense strand
uaagaguacaauggugagcuu

SEQ ID NO: 10741 - DNA, 21 bp, Homo sapiens
caccattgtactcttacacaa

SEQ ID NO: 10742 - RNA, 21 nt, RNAi-sense strand
ccauuguacucuuacacaauu

SEQ ID NO: 10743 - RNA, 21 nt, RNAi-antisense strand
uuguguaagaguacaaugguu

SEQ ID NO: 10744 - DNA, 21 bp, Homo sapiens
cattgtactcttacacaacag

SEQ ID NO: 10745 - RNA, 21 nt, RNAi-sense strand
uuguacucuuacacaacaguu

SEQ ID NO: 10746 - RNA, 21 nt, RNAi-antisense strand
cuguuguguaagaguacaauu

SEQ ID NO: 10747 - DNA, 21 bp, Homo sapiens
caccgtgacagagtcttcaga

SEQ ID NO: 10748 - RNA, 21 nt, RNAi-sense strand
ccgugacagagucuucagauu

SEQ ID NO: 10749 - RNA, 21 nt, RNAi-antisense strand
ucugaagacucugucacgguu

SEQ ID NO: 10750 - DNA, 21 bp, Homo sapiens
cagagtcttcagatggccttt

SEQ ID NO: 10751 - RNA, 21 nt, RNAi-sense strand
gagucuucagauggccuuuuu

SEQ ID NO: 10752 - RNA, 21 nt, RNAi-antisense strand
aaaggccaucugaagacucuu

SEQ ID NO: 10753 - DNA, 21 bp, Homo sapiens
cagatggcctttggaataaca

SEQ ID NO: 10754 - RNA, 21 nt, RNAi-sense strand
gauggccuuuggaauaacauu

SEQ ID NO: 10755 - RNA, 21 nt, RNAi-antisense strand
uguuauuccaaaggccaucuu

SEQ ID NO: 10756 - DNA, 21 bp, Homo sapiens
caatcaaactcaactgttcct

SEQ ID NO: 10757 - RNA, 21 nt, RNAi-sense strand
aucaaacucaacuguuccuuu

SEQ ID NO: 10758 - RNA, 21 nt, RNAi-antisense strand
aggaacaguugaguuugauuu

SEQ ID NO: 10759 - DNA, 21 bp, Homo sapiens
caaactcaactgttcctagaa

SEQ ID NO: 10760 - RNA, 21 nt, RNAi-sense strand
aacucaacuguuccuagaauu

SEQ ID NO: 10761 - RNA, 21 nt, RNAi-antisense strand
uucuaggaacaguugaguuuu

SEQ ID NO: 10762 - DNA, 21 bp, Homo sapiens
caactgttcctagaacatagt

SEQ ID NO: 10763 - RNA, 21 nt, RNAi-sense strand
acuguuccuagaacauaguuu

SEQ ID NO: 10764 - RNA, 21 nt, RNAi-antisense strand
acuauguucuaggaacaguuu

SEQ ID NO: 10765 - DNA, 21 bp, Homo sapiens
catagtctactgacggccaat

SEQ ID NO: 10766 - RNA, 21 nt, RNAi-sense strand
uagucuacugacggccaauuu

SEQ ID NO: 10767 - RNA, 21 nt, RNAi-antisense strand
auuggccgucaguagacuauu

SEQ ID NO: 10768 - DNA, 21 bp, Homo sapiens
caataccactaaaggaatcta

SEQ ID NO: 10769 - RNA, 21 nt, RNAi-sense strand
auaccacuaaaggaaucuauu

SEQ ID NO: 10770 - RNA, 21 nt, RNAi-antisense strand
uagauuccuuuagugguauuu

SEQ ID NO: 10771 - DNA, 21 bp, Homo sapiens
cactaaaggaatctatgctgg

SEQ ID NO: 10772 - RNA, 21 nt, RNAi-sense strand
cuaaaggaaucuaugcugguu

SEQ ID NO: 10773 - RNA, 21 nt, RNAi-antisense strand
ccagcauagauuccuuuaguu

SEQ ID NO: 10774 - DNA, 21 bp, Homo sapiens
caactaagtgtttcatttagc

SEQ ID NO: 10775 - RNA, 21 nt, RNAi-sense strand
acuaaguguuucauuuagcuu

SEQ ID NO: 10776 - RNA, 21 nt, RNAi-antisense strand
gcuaaaugaaacacuuaguuu

SEQ ID NO: 10777 - DNA, 21 bp, Homo sapiens
catttagcagccttcaaatta

SEQ ID NO: 10778 - RNA, 21 nt, RNAi-sense strand
uuuagcagccuucaaauuauu

SEQ ID NO: 10779 - RNA, 21 nt, RNAi-antisense strand
uaauuugaaggcugcuaaauu

SEQ ID NO: 10780 - DNA, 21 bp, Homo sapiens
cagccttcaaattaaagcttt

SEQ ID NO: 10781 - RNA, 21 nt, RNAi-sense strand
gccuucaaauuaaagcuuuuu

SEQ ID NO: 10782 - RNA, 21 nt, RNAi-antisense strand
aaagcuuuaauuugaaggcuu

SEQ ID NO: 10783 - DNA, 21 bp, Homo sapiens
caagcagaagacaatatctac

SEQ ID NO: 10784 - RNA, 21 nt, RNAi-sense strand
agcagaagacaauaucuacuu

SEQ ID NO: 10785 - RNA, 21 nt, RNAi-antisense strand
guagauauugucuucugcuuu

SEQ ID NO: 10786 - DNA, 21 bp, Homo sapiens
cagaagacaatatctacattg

SEQ ID NO: 10787 - RNA, 21 nt, RNAi-sense strand
gaagacaauaucuacauuguu

SEQ ID NO: 10788 - RNA, 21 nt, RNAi-antisense strand
caauguagauauugucuucuu

SEQ ID NO: 10789 - DNA, 21 bp, Homo sapiens
cattgagaatagtctttatgc

SEQ ID NO: 10790 - RNA, 21 nt, RNAi-sense strand
uugagaauagucuuuaugcuu

SEQ ID NO: 10791 - RNA, 21 nt, RNAi-antisense strand
gcauaaagacuauucucaauu

SEQ ID NO: 10792 - DNA, 21 bp, Homo sapiens
cagtggtgctctttgagagtt

SEQ ID NO: 10793 - RNA, 21 nt, RNAi-sense strand
guggugcucuuugagaguuuu

SEQ ID NO: 10794 - RNA, 21 nt, RNAi-antisense strand
aacucucaaagagcaccacuu

SEQ ID NO: 10795 - DNA, 21 bp, Homo sapiens
catgactgcagaagactgaac

SEQ ID NO: 10796 - RNA, 21 nt, RNAi-sense strand
ugacugcagaagacugaacuu

SEQ ID NO: 10797 - RNA, 21 nt, RNAi-antisense strand
guucagucuucugcagucauu

SEQ ID NO: 10798 - DNA, 21 bp, Homo sapiens
cagaagactgaacaggtatca

SEQ ID NO: 10799 - RNA, 21 nt, RNAi-sense strand
gaagacugaacagguaucauu

SEQ ID NO: 10800 - RNA, 21 nt, RNAi-antisense strand
ugauaccuguucagucuucuu

SEQ ID NO: 10801 - DNA, 21 bp, Homo sapiens
caggtatcagcacatcagatg

SEQ ID NO: 10802 - RNA, 21 nt, RNAi-sense strand
gguaucagcacaucagauguu

SEQ ID NO: 10803 - RNA, 21 nt, RNAi-antisense strand
caucugaugugcugauaccuu

SEQ ID NO: 10804 - DNA, 21 bp, Homo sapiens
cagtttcatctggcattccaa

SEQ ID NO: 10805 - RNA, 21 nt, RNAi-sense strand
guuucaucuggcauuccaauu

SEQ ID NO: 10806 - RNA, 21 nt, RNAi-antisense strand
uuggaaugccagaugaaacuu

SEQ ID NO: 10807 - DNA, 21 bp, Homo sapiens
catctggcattccaacatgtc

SEQ ID NO: 10808 - RNA, 21 nt, RNAi-sense strand
ucuggcauuccaacaugucuu

SEQ ID NO: 10809 - RNA, 21 nt, RNAi-antisense strand
gacauguuggaaugccagauu

SEQ ID NO: 10810 - DNA, 21 bp, Homo sapiens
cattccaacatgtcagtgata

SEQ ID NO: 10811 - RNA, 21 nt, RNAi-sense strand
uuccaacaugucagugauauu

SEQ ID NO: 10812 - RNA, 21 nt, RNAi-antisense strand
uaucacugacauguuggaauu

SEQ ID NO: 10813 - DNA, 21 bp, Homo sapiens
cactccaaactgtgtatagtc

SEQ ID NO: 10814 - RNA, 21 nt, RNAi-sense strand
cuccaaacuguguauagucuu

SEQ ID NO: 10815 - RNA, 21 nt, RNAi-antisense strand
gacuauacacaguuuggaguu

SEQ ID NO: 10816 - DNA, 21 bp, Homo sapiens
caaactgtgtatagtcaacct

SEQ ID NO: 10817 - RNA, 21 nt, RNAi-sense strand
aacuguguauagucaaccuuu

SEQ ID NO: 10818 - RNA, 21 nt, RNAi-antisense strand
agguugacuauacacaguuuu

SEQ ID NO: 10819 - DNA, 21 bp, Homo sapiens
caacctcatcattaatgtagt

SEQ ID NO: 10820 - RNA, 21 nt, RNAi-sense strand
accucaucauuaauguaguuu

SEQ ID NO: 10821 - RNA, 21 nt, RNAi-antisense strand
acuacauuaaugaugagguuu

SEQ ID NO: 10822 - DNA, 21 bp, Homo sapiens
caatccttctgatcattgcag

SEQ ID NO: 10823 - RNA, 21 nt, RNAi-sense strand
auccuucugaucauugcaguu

SEQ ID NO: 10824 - RNA, 21 nt, RNAi-antisense strand
cugcaaugaucagaaggauuu

SEQ ID NO: 10825 - DNA, 21 bp, Homo sapiens
gattctgtagctggttctgta

SEQ ID NO: 10826 - RNA, 21 nt, RNAi-sense strand
uucuguagcugguucuguauu

SEQ ID NO: 10827 - RNA, 21 nt, RNAi-antisense strand
uacagaaccagcuacagaauu

SEQ ID NO: 10828 - DNA, 21 bp, Homo sapiens
gagaggcaggtccatctgtca

SEQ ID NO: 10829 - RNA, 21 nt, RNAi-sense strand
gaggcagguccaucugucauu

SEQ ID NO: 10830 - RNA, 21 nt, RNAi-antisense strand
ugacagauggaccugccucuu

SEQ ID NO: 10831 - DNA, 21 bp, Homo sapiens
gaggcaggtccatctgtcaca

SEQ ID NO: 10832 - RNA, 21 nt, RNAi-sense strand
ggcagguccaucugucacauu

SEQ ID NO: 10833 - RNA, 21 nt, RNAi-antisense strand
ugugacagauggaccugccuu

SEQ ID NO: 10834 - DNA, 21 bp, Homo sapiens
gagctgtcacatcaatgtgct

SEQ ID NO: 10835 - RNA, 21 nt, RNAi-sense strand
gcugucacaucaaugugcuuu

SEQ ID NO: 10836 - RNA, 21 nt, RNAi-antisense strand
agcacauugaugugacagcuu

SEQ ID NO: 10837 - DNA, 21 bp, Homo sapiens
gaatagaggctcatgttctct

SEQ ID NO: 10838 - RNA, 21 nt, RNAi-sense strand
auagaggcucauguucucuuu

SEQ ID NO: 10839 - RNA, 21 nt, RNAi-antisense strand
agagaacaugagccucuauuu

SEQ ID NO: 10840 - DNA, 21 bp, Homo sapiens
gaggctcatgttctctattca

SEQ ID NO: 10841 - RNA, 21 nt, RNAi-sense strand
ggcucauguucucuauucauu

SEQ ID NO: 10842 - RNA, 21 nt, RNAi-antisense strand
ugaauagagaacaugagccuu

SEQ ID NO: 10843 - DNA, 21 bp, Homo sapiens
gaaggacacacgctataagct

SEQ ID NO: 10844 - RNA, 21 nt, RNAi-sense strand
aggacacacgcuauaagcuuu

SEQ ID NO: 10845 - RNA, 21 nt, RNAi-antisense strand
agcuuauagcguguguccuuu

SEQ ID NO: 10846 - DNA, 21 bp, Homo sapiens
gacacacgctataagctattg

SEQ ID NO: 10847 - RNA, 21 nt, RNAi-sense strand
cacacgcuauaagcuauuguu

SEQ ID NO: 10848 - RNA, 21 nt, RNAi-antisense strand
caauagcuuauagcguguguu

SEQ ID NO: 10849 - DNA, 21 bp, Homo sapiens
gatgtctctttgaccatagaa

SEQ ID NO: 10850 - RNA, 21 nt, RNAi-sense strand
ugucucuuugaccauagaauu

SEQ ID NO: 10851 - RNA, 21 nt, RNAi-antisense strand
uucuauggucaaagagacauu

SEQ ID NO: 10852 - DNA, 21 bp, Homo sapiens
gacagtggcgtatattgttgc

SEQ ID NO: 10853 - RNA, 21 nt, RNAi-sense strand
caguggcguauauuguugcuu

SEQ ID NO: 10854 - RNA, 21 nt, RNAi-antisense strand
gcaacaauauacgccacuguu

SEQ ID NO: 10855 - DNA, 21 bp, Homo sapiens
gactactccaattgtcacaac

SEQ ID NO: 10856 - RNA, 21 nt, RNAi-sense strand
cuacuccaauugucacaacuu

SEQ ID NO: 10857 - RNA, 21 nt, RNAi-antisense strand
guugugacaauuggaguaguu

SEQ ID NO: 10858 - DNA, 21 bp, Homo sapiens
gactgttcgaacgagcaccac

SEQ ID NO: 10859 - RNA, 21 nt, RNAi-sense strand
cuguucgaacgagcaccacuu

SEQ ID NO: 10860 - RNA, 21 nt, RNAi-antisense strand
guggugcucguucgaacaguu

SEQ ID NO: 10861 - DNA, 21 bp, Homo sapiens
gaacgagcaccactgttccaa

SEQ ID NO: 10862 - RNA, 21 nt, RNAi-sense strand
acgagcaccacuguuccaauu

SEQ ID NO: 10863 - RNA, 21 nt, RNAi-antisense strand
uuggaacaguggugcucguuu

SEQ ID NO: 10864 - DNA, 21 bp, Homo sapiens
gagcaccactgttccaacgac

SEQ ID NO: 10865 - RNA, 21 nt, RNAi-sense strand
gcaccacuguuccaacgacuu

SEQ ID NO: 10866 - RNA, 21 nt, RNAi-antisense strand
gucguuggaacaguggugcuu

SEQ ID NO: 10867 - DNA, 21 bp, Homo sapiens
gacaacgactgttccaacgac

SEQ ID NO: 10868 - RNA, 21 nt, RNAi-sense strand
caacgacuguuccaacgacuu

SEQ ID NO: 10869 - RNA, 21 nt, RNAi-antisense strand
gucguuggaacagucguuguu

SEQ ID NO: 10870 - DNA, 21 bp, Homo sapiens
gactgttccaacgacaactgt

SEQ ID NO: 10871 - RNA, 21 nt, RNAi-sense strand
cuguuccaacgacaacuguuu

SEQ ID NO: 10872 - RNA, 21 nt, RNAi-antisense strand
acaguugucguuggaacaguu

SEQ ID NO: 10873 - DNA, 21 bp, Homo sapiens
gacaactgttccaacaacaat

SEQ ID NO: 10874 - RNA, 21 nt, RNAi-sense strand
caacuguuccaacaacaauuu

SEQ ID NO: 10875 - RNA, 21 nt, RNAi-antisense strand
auuguuguuggaacaguuguu

SEQ ID NO: 10876 - DNA, 21 bp, Homo sapiens
gagcattccaacgacaacgac

SEQ ID NO: 10877 - RNA, 21 nt, RNAi-sense strand
gcauuccaacgacaacgacuu

SEQ ID NO: 10878 - RNA, 21 nt, RNAi-antisense strand
gucguugucguuggaaugcuu

SEQ ID NO: 10879 - DNA, 21 bp, Homo sapiens
gacaacgactgttccgacgac

SEQ ID NO: 10880 - RNA, 21 nt, RNAi-sense strand
caacgacuguuccgacgacuu

SEQ ID NO: 10881 - RNA, 21 nt, RNAi-antisense strand
gucgucggaacagucguuguu

SEQ ID NO: 10882 - DNA, 21 bp, Homo sapiens
gactgttccgacgacaatgac

SEQ ID NO: 10883 - RNA, 21 nt, RNAi-sense strand
cuguuccgacgacaaugacuu

SEQ ID NO: 10884 - RNA, 21 nt, RNAi-antisense strand
gucauugucgucggaacaguu

SEQ ID NO: 10885 - DNA, 21 bp, Homo sapiens
gacgacaatgactgtttcaac

SEQ ID NO: 10886 - RNA, 21 nt, RNAi-sense strand
cgacaaugacuguuucaacuu

SEQ ID NO: 10887 - RNA, 21 nt, RNAi-antisense strand
guugaaacagucauugucguu

SEQ ID NO: 10888 - DNA, 21 bp, Homo sapiens
gacaatgactgtttcaacgac

SEQ ID NO: 10889 - RNA, 21 nt, RNAi-sense strand
caaugacuguuucaacgacuu

SEQ ID NO: 10890 - RNA, 21 nt, RNAi-antisense strand
gucguugaaacagucauuguu

SEQ ID NO: 10891 - DNA, 21 bp, Homo sapiens
gactgtttcaacgacaacgag

SEQ ID NO: 10892 - RNA, 21 nt, RNAi-sense strand
cuguuucaacgacaacgaguu

SEQ ID NO: 10893 - RNA, 21 nt, RNAi-antisense strand
cucguugucguugaaacaguu

SEQ ID NO: 10894 - DNA, 21 bp, Homo sapiens
gacaacgagcgttccaacgac

SEQ ID NO: 10895 - RNA, 21 nt, RNAi-sense strand
caacgagcguuccaacgacuu

SEQ ID NO: 10896 - RNA, 21 nt, RNAi-antisense strand
gucguuggaacgcucguuguu

SEQ ID NO: 10897 - DNA, 21 bp, Homo sapiens
gagcgttccaacgacaacgag

SEQ ID NO: 10898 - RNA, 21 nt, RNAi-sense strand
gcguuccaacgacaacgaguu

SEQ ID NO: 10899 - RNA, 21 nt, RNAi-antisense strand
cucguugucguuggaacgcuu

SEQ ID NO: 10900 - DNA, 21 bp, Homo sapiens
gacaacgagcattccaacaac

SEQ ID NO: 10901 - RNA, 21 nt, RNAi-sense strand
caacgagcauuccaacaacuu

SEQ ID NO: 10902 - RNA, 21 nt, RNAi-antisense strand
guuguuggaaugcucguuguu

SEQ ID NO: 10903 - DNA, 21 bp, Homo sapiens
gagcattccaacaacaacaag

SEQ ID NO: 10904 - RNA, 21 nt, RNAi-sense strand
gcauuccaacaacaacaaguu

SEQ ID NO: 10905 - RNA, 21 nt, RNAi-antisense strand
cuuguuguuguuggaaugcuu

SEQ ID NO: 10906 - DNA, 21 bp, Homo sapiens
gacaacaacggtctctacctt

SEQ ID NO: 10907 - RNA, 21 nt, RNAi-sense strand
caacaacggucucuaccuuuu

SEQ ID NO: 10908 - RNA, 21 nt, RNAi-antisense strand
aagguagagaccguuguuguu

SEQ ID NO: 10909 - DNA, 21 bp, Homo sapiens
gaaccatgaaccagtagccac

SEQ ID NO: 10910 - RNA, 21 nt, RNAi-sense strand
accaugaaccaguagccacuu

SEQ ID NO: 10911 - RNA, 21 nt, RNAi-antisense strand
guggcuacugguucaugguuu

SEQ ID NO: 10912 - DNA, 21 bp, Homo sapiens
gaaccagtagccacttcacca

SEQ ID NO: 10913 - RNA, 21 nt, RNAi-sense strand
accaguagccacuucaccauu

SEQ ID NO: 10914 - RNA, 21 nt, RNAi-antisense strand
uggugaaguggcuacugguuu

SEQ ID NO: 10915 - DNA, 21 bp, Homo sapiens
gaatgacaccgtgacagagtc

SEQ ID NO: 10916 - RNA, 21 nt, RNAi-sense strand
augacaccgugacagagucuu

SEQ ID NO: 10917 - RNA, 21 nt, RNAi-antisense strand
gacucugucacggugucauuu

SEQ ID NO: 10918 - DNA, 21 bp, Homo sapiens
gacaccgtgacagagtcttca

SEQ ID NO: 10919 - RNA, 21 nt, RNAi-sense strand
caccgugacagagucuucauu

SEQ ID NO: 10920 - RNA, 21 nt, RNAi-antisense strand
ugaagacucugucacgguguu

SEQ ID NO: 10921 - DNA, 21 bp, Homo sapiens
gacagagtcttcagatggcct

SEQ ID NO: 10922 - RNA, 21 nt, RNAi-sense strand
cagagucuucagauggccuuu

SEQ ID NO: 10923 - RNA, 21 nt, RNAi-antisense strand
aggccaucugaagacucuguu

SEQ ID NO: 10924 - DNA, 21 bp, Homo sapiens
gagtcttcagatggcctttgg

SEQ ID NO: 10925 - RNA, 21 nt, RNAi-sense strand
gucuucagauggccuuugguu

SEQ ID NO: 10926 - RNA, 21 nt, RNAi-antisense strand
ccaaaggccaucugaagacuu

SEQ ID NO: 10927 - DNA, 21 bp, Homo sapiens
gatggcctttggaataacaat

SEQ ID NO: 10928 - RNA, 21 nt, RNAi-sense strand
uggccuuuggaauaacaauuu

SEQ ID NO: 10929 - RNA, 21 nt, RNAi-antisense strand
auuguuauuccaaaggccauu

SEQ ID NO: 10930 - DNA, 21 bp, Homo sapiens
gaacatagtctactgacggcc

SEQ ID NO: 10931 - RNA, 21 nt, RNAi-sense strand
acauagucuacugacggccuu

SEQ ID NO: 10932 - RNA, 21 nt, RNAi-antisense strand
ggccgucaguagacuauguuu

SEQ ID NO: 10933 - DNA, 21 bp, Homo sapiens
gacggccaataccactaaagg

SEQ ID NO: 10934 - RNA, 21 nt, RNAi-sense strand
cggccaauaccacuaaagguu

SEQ ID NO: 10935 - RNA, 21 nt, RNAi-antisense strand
ccuuuagugguauuggccguu

SEQ ID NO: 10936 - DNA, 21 bp, Homo sapiens
gaatctatgctggagtctgta

SEQ ID NO: 10937 - RNA, 21 nt, RNAi-sense strand
aucuaugcuggagucuguauu

SEQ ID NO: 10938 - RNA, 21 nt, RNAi-antisense strand
uacagacuccagcauagauuu

SEQ ID NO: 10939 - DNA, 21 bp, Homo sapiens
gagtctgtatttctgtcttgg

SEQ ID NO: 10940 - RNA, 21 nt, RNAi-sense strand
gucuguauuucugucuugguu

SEQ ID NO: 10941 - RNA, 21 nt, RNAi-antisense strand
ccaagacagaaauacagacuu

SEQ ID NO: 10942 - DNA, 21 bp, Homo sapiens
gaggttcaacaactaagtgtt

SEQ ID NO: 10943 - RNA, 21 nt, RNAi-sense strand
gguucaacaacuaaguguuuu

SEQ ID NO: 10944 - RNA, 21 nt, RNAi-antisense strand
aacacuuaguuguugaaccuu

SEQ ID NO: 10945 - DNA, 21 bp, Homo sapiens
gaagtccaagcagaagacaat

SEQ ID NO: 10946 - RNA, 21 nt, RNAi-sense strand
aguccaagcagaagacaauuu

SEQ ID NO: 10947 - RNA, 21 nt, RNAi-antisense strand
auugucuucugcuuggacuuu

SEQ ID NO: 10948 - DNA, 21 bp, Homo sapiens
gaagacaatatctacattgag

SEQ ID NO: 10949 - RNA, 21 nt, RNAi-sense strand
agacaauaucuacauugaguu

SEQ ID NO: 10950 - RNA, 21 nt, RNAi-antisense strand
cucaauguagauauugucuuu

SEQ ID NO: 10951 - DNA, 21 bp, Homo sapiens
gagaatagtctttatgccacg

SEQ ID NO: 10952 - RNA, 21 nt, RNAi-sense strand
gaauagucuuuaugccacguu

SEQ ID NO: 10953 - RNA, 21 nt, RNAi-antisense strand
cguggcauaaagacuauucuu

SEQ ID NO: 10954 - DNA, 21 bp, Homo sapiens
gaatagtctttatgccacgga

SEQ ID NO: 10955 - RNA, 21 nt, RNAi-sense strand
auagucuuuaugccacggauu

SEQ ID NO: 10956 - RNA, 21 nt, RNAi-antisense strand
uccguggcauaaagacuauuu

SEQ ID NO: 10957 - DNA, 21 bp, Homo sapiens
gactgcagaagactgaacagg

SEQ ID NO: 10958 - RNA, 21 nt, RNAi-sense strand
cugcagaagacugaacagguu

SEQ ID NO: 10959 - RNA, 21 nt, RNAi-antisense strand
ccuguucagucuucugcaguu

SEQ ID NO: 10960 - DNA, 21 bp, Homo sapiens
gaagactgaacaggtatcagc

SEQ ID NO: 10961 - RNA, 21 nt, RNAi-sense strand
agacugaacagguaucagcuu

SEQ ID NO: 10962 - RNA, 21 nt, RNAi-antisense strand
gcugauaccuguucagucuuu

SEQ ID NO: 10963 - DNA, 21 bp, Homo sapiens
gactgaacaggtatcagcaca

SEQ ID NO: 10964 - RNA, 21 nt, RNAi-sense strand
cugaacagguaucagcacauu

SEQ ID NO: 10965 - RNA, 21 nt, RNAi-antisense strand
ugugcugauaccuguucaguu

SEQ ID NO: 10966 - DNA, 21 bp, Homo sapiens
gaacaggtatcagcacatcag

SEQ ID NO: 10967 - RNA, 21 nt, RNAi-sense strand
acagguaucagcacaucaguu

SEQ ID NO: 10968 - RNA, 21 nt, RNAi-antisense strand
cugaugugcugauaccuguuu

SEQ ID NO: 10969 - DNA, 21 bp, Homo sapiens
taagcctcatcctacatctgg

SEQ ID NO: 10970 - RNA, 21 nt, RNAi-sense strand
agccucauccuacaucugguu

SEQ ID NO: 10971 - RNA, 21 nt, RNAi-antisense strand
ccagauguaggaugaggcuuu

SEQ ID NO: 10972 - DNA, 21 bp, Homo sapiens
tacatctggcagattctgtag

SEQ ID NO: 10973 - RNA, 21 nt, RNAi-sense strand
caucuggcagauucuguaguu

SEQ ID NO: 10974 - RNA, 21 nt, RNAi-antisense strand
cuacagaaucugccagauguu

SEQ ID NO: 10975 - DNA, 21 bp, Homo sapiens
tagctggttctgtaaaggttg

SEQ ID NO: 10976 - RNA, 21 nt, RNAi-sense strand
gcugguucuguaaagguuguu

SEQ ID NO: 10977 - RNA, 21 nt, RNAi-antisense strand
caaccuuuacagaaccagcuu

SEQ ID NO: 10978 - DNA, 21 bp, Homo sapiens
taaaggttggtggagaggcag

SEQ ID NO: 10979 - RNA, 21 nt, RNAi-sense strand
aagguugguggagaggcaguu

SEQ ID NO: 10980 - RNA, 21 nt, RNAi-antisense strand
cugccucuccaccaaccuuuu

SEQ ID NO: 10981 - DNA, 21 bp, Homo sapiens
tacagtggagctgtcacatca

SEQ ID NO: 10982 - RNA, 21 nt, RNAi-sense strand
caguggagcugucacaucauu

SEQ ID NO: 10983 - RNA, 21 nt, RNAi-antisense strand
ugaugugacagcuccacuguu

SEQ ID NO: 10984 - DNA, 21 bp, Homo sapiens
tagaggctcatgttctctatt

SEQ ID NO: 10985 - RNA, 21 nt, RNAi-sense strand
gaggcucauguucucuauuuu

SEQ ID NO: 10986 - RNA, 21 nt, RNAi-antisense strand
aauagagaacaugagccucuu

SEQ ID NO: 10987 - DNA, 21 bp, Homo sapiens
tatcggaaggacacacgctat

SEQ ID NO: 10988 - RNA, 21 nt, RNAi-sense strand
ucggaaggacacacgcuauuu

SEQ ID NO: 10989 - RNA, 21 nt, RNAi-antisense strand
auagcguguguccuuccgauu

SEQ ID NO: 10990 - DNA, 21 bp, Homo sapiens
tacagctgtgtctgacagtgg

SEQ ID NO: 10991 - RNA, 21 nt, RNAi-sense strand
cagcugugucugacagugguu

SEQ ID NO: 10992 - RNA, 21 nt, RNAi-antisense strand
ccacugucagacacagcuguu

SEQ ID NO: 10993 - DNA, 21 bp, Homo sapiens
tatattgttgccgtgttgagc

SEQ ID NO: 10994 - RNA, 21 nt, RNAi-sense strand
uauuguugccguguugagcuu

SEQ ID NO: 10995 - RNA, 21 nt, RNAi-antisense strand
gcucaacacggcaacaauauu

SEQ ID NO: 10996 - DNA, 21 bp, Homo sapiens
tattgttgccgtgttgagcac

SEQ ID NO: 10997 - RNA, 21 nt, RNAi-sense strand
uuguugccguguugagcacuu

SEQ ID NO: 10998 - RNA, 21 nt, RNAi-antisense strand
gugcucaacacggcaacaauu

SEQ ID NO: 10999 - DNA, 21 bp, Homo sapiens
tatcattggagattgtgccac

SEQ ID NO: 11000 - RNA, 21 nt, RNAi-sense strand
ucauuggagauugugccacuu

SEQ ID NO: 11001 - RNA, 21 nt, RNAi-antisense strand
guggcacaaucuccaaugauu

SEQ ID NO: 11002 - DNA, 21 bp, Homo sapiens
tactccaattgtcacaactgt

SEQ ID NO: 11003 - RNA, 21 nt, RNAi-sense strand
cuccaauugucacaacuguuu

SEQ ID NO: 11004 - RNA, 21 nt, RNAi-antisense strand
acaguugugacaauuggaguu

SEQ ID NO: 11005 - DNA, 21 bp, Homo sapiens
tacctttgttcctccaatgcc

SEQ ID NO: 11006 - RNA, 21 nt, RNAi-sense strand
ccuuuguuccuccaaugccuu

SEQ ID NO: 11007 - RNA, 21 nt, RNAi-antisense strand
ggcauuggaggaacaaagguu

SEQ ID NO: 11008 - DNA, 21 bp, Homo sapiens
tagccacttcaccatcttcac

SEQ ID NO: 11009 - RNA, 21 nt, RNAi-sense strand
gccacuucaccaucuucacuu

SEQ ID NO: 11010 - RNA, 21 nt, RNAi-antisense strand
gugaagauggugaaguggcuu

SEQ ID NO: 11011 - DNA, 21 bp, Homo sapiens
tagaacatagtctactgacgg

SEQ ID NO: 11012 - RNA, 21 nt, RNAi-sense strand
gaacauagucuacugacgguu

SEQ ID NO: 11013 - RNA, 21 nt, RNAi-antisense strand
ccgucaguagacuauguucuu

SEQ ID NO: 11014 - DNA, 21 bp, Homo sapiens
tagtctactgacggccaatac

SEQ ID NO: 11015 - RNA, 21 nt, RNAi-sense strand
gucuacugacggccaauacuu

SEQ ID NO: 11016 - RNA, 21 nt, RNAi-antisense strand
guauuggccgucaguagacuu

SEQ ID NO: 11017 - DNA, 21 bp, Homo sapiens
tactgacggccaataccacta

SEQ ID NO: 11018 - RNA, 21 nt, RNAi-sense strand
cugacggccaauaccacuauu

SEQ ID NO: 11019 - RNA, 21 nt, RNAi-antisense strand
uagugguauuggccgucaguu

SEQ ID NO: 11020 - DNA, 21 bp, Homo sapiens
taccactaaaggaatctatgc

SEQ ID NO: 11021 - RNA, 21 nt, RNAi-sense strand
ccacuaaaggaaucuaugcuu

SEQ ID NO: 11022 - RNA, 21 nt, RNAi-antisense strand
gcauagauuccuuuagugguu

SEQ ID NO: 11023 - DNA, 21 bp, Homo sapiens
taaaggaatctatgctggagt

SEQ ID NO: 11024 - RNA, 21 nt, RNAi-sense strand
aaggaaucuaugcuggaguuu

SEQ ID NO: 11025 - RNA, 21 nt, RNAi-antisense strand
acuccagcauagauuccuuuu

SEQ ID NO: 11026 - DNA, 21 bp, Homo sapiens
tatgctggagtctgtatttct

SEQ ID NO: 11027 - RNA, 21 nt, RNAi-sense strand
ugcuggagucuguauuucuuu

SEQ ID NO: 11028 - RNA, 21 nt, RNAi-antisense strand
agaaauacagacuccagcauu

SEQ ID NO: 11029 - DNA, 21 bp, Homo sapiens
tatttctgtcttggtgcttct

SEQ ID NO: 11030 - RNA, 21 nt, RNAi-sense strand
uuucugucuuggugcuucuuu

SEQ ID NO: 11031 - RNA, 21 nt, RNAi-antisense strand
agaagcaccaagacagaaauu

SEQ ID NO: 11032 - DNA, 21 bp, Homo sapiens
taagtgtttcatttagcagcc

SEQ ID NO: 11033 - RNA, 21 nt, RNAi-sense strand
aguguuucauuuagcagccuu

SEQ ID NO: 11034 - RNA, 21 nt, RNAi-antisense strand
ggcugcuaaaugaaacacuuu

SEQ ID NO: 11035 - DNA, 21 bp, Homo sapiens
tagcagccttcaaattaaagc

SEQ ID NO: 11036 - RNA, 21 nt, RNAi-sense strand
gcagccuucaaauuaaagcuu

SEQ ID NO: 11037 - RNA, 21 nt, RNAi-antisense strand
gcuuuaauuugaaggcugcuu

SEQ ID NO: 11038 - DNA, 21 bp, Homo sapiens
tagtctttatgccacggacta

SEQ ID NO: 11039 - RNA, 21 nt, RNAi-sense strand
gucuuuaugccacggacuauu

SEQ ID NO: 11040 - RNA, 21 nt, RNAi-antisense strand
uaguccguggcauaaagacuu

SEQ ID NO: 11041 - DNA, 21 bp, Homo sapiens
tatcagcacatcagatgtctt

SEQ ID NO: 11042 - RNA, 21 nt, RNAi-sense strand
ucagcacaucagaugucuuuu

SEQ ID NO: 11043 - RNA, 21 nt, RNAi-antisense strand
aagacaucugaugugcugauu

SEQ ID NO: 11044 - DNA, 21 bp, Homo sapiens
tagtcaacctcatcattaatg

SEQ ID NO: 11045 - RNA, 21 nt, RNAi-sense strand
gucaaccucaucauuaauguu

SEQ ID NO: 11046 - RNA, 21 nt, RNAi-antisense strand
cauuaaugaugagguugacuu

SEQ ID NO: 11047 - DNA, 21 bp, Homo sapiens
aaggacacacgctataagcta

SEQ ID NO: 11048 - RNA, 21 nt, RNAi-sense strand
ggacacacgcuauaagcuauu

SEQ ID NO: 11049 - RNA, 21 nt, RNAi-antisense strand
uagcuuauagcguguguccuu

SEQ ID NO: 11050 - DNA, 21 bp, Homo sapiens
aatcaccgtatcattggagat

SEQ ID NO: 11051 - RNA, 21 nt, RNAi-sense strand
ucaccguaucauuggagauuu

SEQ ID NO: 11052 - RNA, 21 nt, RNAi-antisense strand
aucuccaaugauacggugauu

SEQ ID NO: 11053 - DNA, 21 bp, Homo sapiens
aatgagcattccaacgacaac

SEQ ID NO: 11054 - RNA, 21 nt, RNAi-sense strand
ugagcauuccaacgacaacuu

SEQ ID NO: 11055 - RNA, 21 nt, RNAi-antisense strand
guugucguuggaaugcucauu

SEQ ID NO: 11056 - DNA, 21 bp, Homo sapiens
aacgactgttccgacgacaat

SEQ ID NO: 11057 - RNA, 21 nt, RNAi-sense strand
cgacuguuccgacgacaauuu

SEQ ID NO: 11058 - RNA, 21 nt, RNAi-antisense strand
auugucgucggaacagucguu

SEQ ID NO: 11059 - DNA, 21 bp, Homo sapiens
aacgacaacgagcattccaac

SEQ ID NO: 11060 - RNA, 21 nt, RNAi-sense strand
cgacaacgagcauuccaacuu

SEQ ID NO: 11061 - RNA, 21 nt, RNAi-antisense strand
guuggaaugcucguugucguu

SEQ ID NO: 11062 - DNA, 21 bp, Homo sapiens
aatgacaccgtgacagagtct

SEQ ID NO: 11063 - RNA, 21 nt, RNAi-sense strand
ugacaccgugacagagucuuu

SEQ ID NO: 11064 - RNA, 21 nt, RNAi-antisense strand
agacucugucacggugucauu

SEQ ID NO: 11065 - DNA, 21 bp, Homo sapiens
aacatagtctactgacggcca

SEQ ID NO: 11066 - RNA, 21 nt, RNAi-sense strand
cauagucuacugacggccauu

SEQ ID NO: 11067 - RNA, 21 nt, RNAi-antisense strand
uggccgucaguagacuauguu

SEQ ID NO: 11068 - DNA, 21 bp, Homo sapiens
aaaggaggttcaacaactaag

SEQ ID NO: 11069 - RNA, 21 nt, RNAi-sense strand
aggagguucaacaacuaaguu

SEQ ID NO: 11070 - RNA, 21 nt, RNAi-antisense strand
cuuaguuguugaaccuccuuu

SEQ ID NO: 11071 - DNA, 21 bp, Homo sapiens
aaggaggttcaacaactaagt

SEQ ID NO: 11072 - RNA, 21 nt, RNAi-sense strand
ggagguucaacaacuaaguuu

SEQ ID NO: 11073 - RNA, 21 nt, RNAi-antisense strand
acuuaguuguugaaccuccuu

SEQ ID NO: 11074 - DNA, 21 bp, Homo sapiens
aagtgtttcatttagcagcct

SEQ ID NO: 11075 - RNA, 21 nt, RNAi-sense strand
guguuucauuuagcagccuuu

SEQ ID NO: 11076 - RNA, 21 nt, RNAi-antisense strand
aggcugcuaaaugaaacacuu

SEQ ID NO: 11077 - DNA, 21 bp, Homo sapiens
cagtggcgtatattgttgccg

SEQ ID NO: 11078 - RNA, 21 nt, RNAi-sense strand
guggcguauauuguugccguu

SEQ ID NO: 11079 - RNA, 21 nt, RNAi-antisense strand
cggcaacaauauacgccacuu

SEQ ID NO: 11080 - DNA, 21 bp, Homo sapiens
caaggtcacgactactccaat

SEQ ID NO: 11081 - RNA, 21 nt, RNAi-sense strand
aggucacgacuacuccaauuu

SEQ ID NO: 11082 - RNA, 21 nt, RNAi-antisense strand
auuggaguagucgugaccuuu

SEQ ID NO: 11083 - DNA, 21 bp, Homo sapiens
caactgttccaaccgtcacga

SEQ ID NO: 11084 - RNA, 21 nt, RNAi-sense strand
acuguuccaaccgucacgauu

SEQ ID NO: 11085 - RNA, 21 nt, RNAi-antisense strand
ucgugacgguuggaacaguuu

SEQ ID NO: 11086 - DNA, 21 bp, Homo sapiens
caaccgtcacgactgttcgaa

SEQ ID NO: 11087 - RNA, 21 nt, RNAi-sense strand
accgucacgacuguucgaauu

SEQ ID NO: 11088 - RNA, 21 nt, RNAi-antisense strand
uucgaacagucgugacgguuu

SEQ ID NO: 11089 - DNA, 21 bp, Homo sapiens
caacgactgttccgacgacaa

SEQ ID NO: 11090 - RNA, 21 nt, RNAi-sense strand
acgacuguuccgacgacaauu

SEQ ID NO: 11091 - RNA, 21 nt, RNAi-antisense strand
uugucgucggaacagucguuu

SEQ ID NO: 11092 - DNA, 21 bp, Homo sapiens
caacgacaacgagcgttccaa

SEQ ID NO: 11093 - RNA, 21 nt, RNAi-sense strand
acgacaacgagcguuccaauu

SEQ ID NO: 11094 - RNA, 21 nt, RNAi-antisense strand
uuggaacgcucguugucguuu

SEQ ID NO: 11095 - DNA, 21 bp, Homo sapiens
caacgacaacgagcattccaa

SEQ ID NO: 11096 - RNA, 21 nt, RNAi-sense strand
acgacaacgagcauuccaauu

SEQ ID NO: 11097 - RNA, 21 nt, RNAi-antisense strand
uuggaaugcucguugucguuu

SEQ ID NO: 11098 - DNA, 21 bp, Homo sapiens
cagtgacaacaacggtctcta

SEQ ID NO: 11099 - RNA, 21 nt, RNAi-sense strand
gugacaacaacggucucuauu

SEQ ID NO: 11100 - RNA, 21 nt, RNAi-antisense strand
uagagaccguuguugucacuu

SEQ ID NO: 11101 - DNA, 21 bp, Homo sapiens
cagaaccatgaaccagtagcc

SEQ ID NO: 11102 - RNA, 21 nt, RNAi-sense strand
gaaccaugaaccaguagccuu

SEQ ID NO: 11103 - RNA, 21 nt, RNAi-antisense strand
ggcuacugguucaugguucuu

SEQ ID NO: 11104 - DNA, 21 bp, Homo sapiens
caccattgtactcttacacaa

SEQ ID NO: 11105 - RNA, 21 nt, RNAi-sense strand
ccauuguacucuuacacaauu

SEQ ID NO: 11106 - RNA, 21 nt, RNAi-antisense strand
uuguguaagaguacaaugguu

SEQ ID NO: 11107 - DNA, 21 bp, Homo sapiens
catagtctactgacggccaat

SEQ ID NO: 11108 - RNA, 21 nt, RNAi-sense strand
uagucuacugacggccaauuu

SEQ ID NO: 11109 - RNA, 21 nt, RNAi-antisense strand
auuggccgucaguagacuauu

SEQ ID NO: 11110 - DNA, 21 bp, Homo sapiens
gaaggacacacgctataagct

SEQ ID NO: 11111 - RNA, 21 nt, RNAi-sense strand
aggacacacgcuauaagcuuu

SEQ ID NO: 11112 - RNA, 21 nt, RNAi-antisense strand
agcuuauagcguguguccuuu

SEQ ID NO: 11113 - DNA, 21 bp, Homo sapiens
gacacacgctataagctattg

SEQ ID NO: 11114 - RNA, 21 nt, RNAi-sense strand
cacacgcuauaagcuauuguu

SEQ ID NO: 11115 - RNA, 21 nt, RNAi-antisense strand
caauagcuuauagcguguguu

SEQ ID NO: 11116 - DNA, 21 bp, Homo sapiens
gagcattccaacgacaacgac

SEQ ID NO: 11117 - RNA, 21 nt, RNAi-sense strand
gcauuccaacgacaacgacuu

SEQ ID NO: 11118 - RNA, 21 nt, RNAi-antisense strand
gucguugucguuggaaugcuu

SEQ ID NO: 11119 - DNA, 21 bp, Homo sapiens
gactgttccgacgacaatgac

SEQ ID NO: 11120 - RNA, 21 nt, RNAi-sense strand
cuguuccgacgacaaugacuu

SEQ ID NO: 11121 - RNA, 21 nt, RNAi-antisense strand
gucauugucgucggaacaguu

SEQ ID NO: 11122 - DNA, 21 bp, Homo sapiens
gaatgacaccgtgacagagtc

SEQ ID NO: 11123 - RNA, 21 nt, RNAi-sense strand
augacaccgugacagagucuu

SEQ ID NO: 11124 - RNA, 21 nt, RNAi-antisense strand
gacucugucacggugucauuu

SEQ ID NO: 11125 - DNA, 21 bp, Homo sapiens
gaacatagtctactgacggcc

SEQ ID NO: 11126 - RNA, 21 nt, RNAi-sense strand
acauagucuacugacggccuu

SEQ ID NO: 11127 - RNA, 21 nt, RNAi-antisense strand
ggccgucaguagacuauguuu

SEQ ID NO: 11128 - DNA, 21 bp, Homo sapiens
gacggccaataccactaaagg

SEQ ID NO: 11129 - RNA, 21 nt, RNAi-sense strand
cggccaauaccacuaaagguu

SEQ ID NO: 11130 - RNA, 21 nt, RNAi-antisense strand
ccuuuagugguauuggccguu

SEQ ID NO: 11131 - DNA, 21 bp, Homo sapiens
tatattgttgccgtgttgagc

SEQ ID NO: 11132 - RNA, 21 nt, RNAi-sense strand
uauuguugccguguugagcuu

SEQ ID NO: 11133 - RNA, 21 nt, RNAi-antisense strand
gcucaacacggcaacaauauu

SEQ ID NO: 11134 - DNA, 21 bp, Homo sapiens
tattgttgccgtgttgagcac

SEQ ID NO: 11135 - RNA, 21 nt, RNAi-sense strand
uuguugccguguugagcacuu

SEQ ID NO: 11136 - RNA, 21 nt, RNAi-antisense strand
gugcucaacacggcaacaauu

SEQ ID NO: 11137 - DNA, 21 bp, Homo sapiens
tagtctactgacggccaatac

SEQ ID NO: 11138 - RNA, 21 nt, RNAi-sense strand
gucuacugacggccaauacuu

SEQ ID NO: 11139 - RNA, 21 nt, RNAi-antisense strand
guauuggccgucaguagacuu

SEQ ID NO: 11140 - DNA, 21 bp, Homo sapiens
tactgacggccaataccacta

SEQ ID NO: 11141 - RNA, 21 nt, RNAi-sense strand
cugacggccaauaccacuauu

SEQ ID NO: 11142 - RNA, 21 nt, RNAi-antisense strand
uagugguauuggccgucaguu

SEQ ID NO: 11143 - DNA, 21 bp, Homo sapiens
taccactaaaggaatctatgc

SEQ ID NO: 11144 - RNA, 21 nt, RNAi-sense strand
ccacuaaaggaaucuaugcuu

SEQ ID NO: 11145 - RNA, 21 nt, RNAi-antisense strand
gcauagauuccuuuagugguu

SEQ ID NO: 11146 - DNA, 21 bp, Homo sapiens
aagacacagtgagttagcacc

SEQ ID NO: 11147 - RNA, 21 nt, RNAi-sense strand
gacacagugaguuagcaccuu

SEQ ID NO: 11148 - RNA, 21 nt, RNAi-antisense strand
ggugcuaacucacugugucuu

SEQ ID NO: 11149 - DNA, 21 bp, Homo sapiens
aataagtctcctcatatttgc

SEQ ID NO: 11150 - RNA, 21 nt, RNAi-sense strand
uaagucuccucauauuugcuu

SEQ ID NO: 11151 - RNA, 21 nt, RNAi-antisense strand
gcaaauaugaggagacuuauu

SEQ ID NO: 11152 - DNA, 21 bp, Homo sapiens
aagtctcctcatatttgcaag

SEQ ID NO: 11153 - RNA, 21 nt, RNAi-sense strand
gucuccucauauuugcaaguu

SEQ ID NO: 11154 - RNA, 21 nt, RNAi-antisense strand
cuugcaaauaugaggagacuu

SEQ ID NO: 11155 - DNA, 21 bp, Homo sapiens
aatctaaagcctcctcagcct

SEQ ID NO: 11156 - RNA, 21 nt, RNAi-sense strand
ucuaaagccuccucagccuuu

SEQ ID NO: 11157 - RNA, 21 nt, RNAi-antisense strand
aggcugaggaggcuuuagauu

SEQ ID NO: 11158 - DNA, 21 bp, Homo sapiens
aaagcctcctcagccttctga

SEQ ID NO: 11159 - RNA, 21 nt, RNAi-sense strand
agccuccucagccuucugauu

SEQ ID NO: 11160 - RNA, 21 nt, RNAi-antisense strand
ucagaaggcugaggaggcuuu

SEQ ID NO: 11161 - DNA, 21 bp, Homo sapiens
aagcctcctcagccttctgag

SEQ ID NO: 11162 - RNA, 21 nt, RNAi-sense strand
gccuccucagccuucugaguu

SEQ ID NO: 11163 - RNA, 21 nt, RNAi-antisense strand
cucagaaggcugaggaggcuu

SEQ ID NO: 11164 - DNA, 21 bp, Homo sapiens
aaaggaacaggccgaactgct

SEQ ID NO: 11165 - RNA, 21 nt, RNAi-sense strand
aggaacaggccgaacugcuuu

SEQ ID NO: 11166 - RNA, 21 nt, RNAi-antisense strand
agcaguucggccuguuccuuu

SEQ ID NO: 11167 - DNA, 21 bp, Homo sapiens
aaggaacaggccgaactgctg

SEQ ID NO: 11168 - RNA, 21 nt, RNAi-sense strand
ggaacaggccgaacugcuguu

SEQ ID NO: 11169 - RNA, 21 nt, RNAi-antisense strand
cagcaguucggccuguuccuu

SEQ ID NO: 11170 - DNA, 21 bp, Homo sapiens
aacaggccgaactgctgtatg

SEQ ID NO: 11171 - RNA, 21 nt, RNAi-sense strand
caggccgaacugcuguauguu

SEQ ID NO: 11172 - RNA, 21 nt, RNAi-antisense strand
cauacagcaguucggccuguu

SEQ ID NO: 11173 - DNA, 21 bp, Homo sapiens
aacttcacacatgccaccttt

SEQ ID NO: 11174 - RNA, 21 nt, RNAi-sense strand
cuucacacaugccaccuuuuu

SEQ ID NO: 11175 - RNA, 21 nt, RNAi-antisense strand
aaagguggcaugugugaaguu

SEQ ID NO: 11176 - DNA, 21 bp, Homo sapiens
aatgtttggaaactgcatcgt

SEQ ID NO: 11177 - RNA, 21 nt, RNAi-sense strand
uguuuggaaacugcaucguuu

SEQ ID NO: 11178 - RNA, 21 nt, RNAi-antisense strand
acgaugcaguuuccaaacauu

SEQ ID NO: 11179 - DNA, 21 bp, Homo sapiens
aaactgcatcgtggtcttcat

SEQ ID NO: 11180 - RNA, 21 nt, RNAi-sense strand
acugcaucguggucuucauuu

SEQ ID NO: 11181 - RNA, 21 nt, RNAi-antisense strand
augaagaccacgaugcaguuu

SEQ ID NO: 11182 - DNA, 21 bp, Homo sapiens
aactgcatcgtggtcttcatc

SEQ ID NO: 11183 - RNA, 21 nt, RNAi-sense strand
cugcaucguggucuucaucuu

SEQ ID NO: 11184 - RNA, 21 nt, RNAi-antisense strand
gaugaagaccacgaugcaguu

SEQ ID NO: 11185 - DNA, 21 bp, Homo sapiens
aaggacggaacgcagcctgca

SEQ ID NO: 11186 - RNA, 21 nt, RNAi-sense strand
ggacggaacgcagccugcauu

SEQ ID NO: 11187 - RNA, 21 nt, RNAi-antisense strand
ugcaggcugcguuccguccuu

SEQ ID NO: 11188 - DNA, 21 bp, Homo sapiens
aatccaccatcctgctggcca

SEQ ID NO: 11189 - RNA, 21 nt, RNAi-sense strand
uccaccauccugcuggccauu

SEQ ID NO: 11190 - RNA, 21 nt, RNAi-antisense strand
uggccagcaggaugguggauu

SEQ ID NO: 11191 - DNA, 21 bp, Homo sapiens
aatgtcctctcgcactcctat

SEQ ID NO: 11192 - RNA, 21 nt, RNAi-sense strand
uguccucucgcacuccuauuu

SEQ ID NO: 11193 - RNA, 21 nt, RNAi-antisense strand
auaggagugcgagaggacauu

SEQ ID NO: 11194 - DNA, 21 bp, Homo sapiens
aatgaagttggcctatgcaga

SEQ ID NO: 11195 - RNA, 21 nt, RNAi-sense strand
ugaaguuggccuaugcagauu

SEQ ID NO: 11196 - RNA, 21 nt, RNAi-antisense strand
ucugcauaggccaacuucauu

SEQ ID NO: 11197 - DNA, 21 bp, Homo sapiens
aagttggcctatgcagacact

SEQ ID NO: 11198 - RNA, 21 nt, RNAi-sense strand
guuggccuaugcagacacuuu

SEQ ID NO: 11199 - RNA, 21 nt, RNAi-antisense strand
agugucugcauaggccaacuu

SEQ ID NO: 11200 - DNA, 21 bp, Homo sapiens
aatgtggtatatggtcttact

SEQ ID NO: 11201 - RNA, 21 nt, RNAi-sense strand
ugugguauauggucuuacuuu

SEQ ID NO: 11202 - RNA, 21 nt, RNAi-antisense strand
aguaagaccauauaccacauu

SEQ ID NO: 11203 - DNA, 21 bp, Homo sapiens
aatgttcatctccttgtccta

SEQ ID NO: 11204 - RNA, 21 nt, RNAi-sense strand
uguucaucuccuuguccuauu

SEQ ID NO: 11205 - RNA, 21 nt, RNAi-antisense strand
uaggacaaggagaugaacauu

SEQ ID NO: 11206 - DNA, 21 bp, Homo sapiens
aatacgaacggttctgcaact

SEQ ID NO: 11207 - RNA, 21 nt, RNAi-sense strand
uacgaacgguucugcaacuuu

SEQ ID NO: 11208 - RNA, 21 nt, RNAi-antisense strand
aguugcagaaccguucguauu

SEQ ID NO: 11209 - DNA, 21 bp, Homo sapiens
aacggttctgcaactgccttc

SEQ ID NO: 11210 - RNA, 21 nt, RNAi-sense strand
cgguucugcaacugccuucuu

SEQ ID NO: 11211 - RNA, 21 nt, RNAi-antisense strand
gaaggcaguugcagaaccguu

SEQ ID NO: 11212 - DNA, 21 bp, Homo sapiens
aactgccttccaagtcagagc

SEQ ID NO: 11213 - RNA, 21 nt, RNAi-sense strand
cugccuuccaagucagagcuu

SEQ ID NO: 11214 - RNA, 21 nt, RNAi-antisense strand
gcucugacuuggaaggcaguu

SEQ ID NO: 11215 - DNA, 21 bp, Homo sapiens
aaggcctttggaacctgtgtg

SEQ ID NO: 11216 - RNA, 21 nt, RNAi-sense strand
ggccuuuggaaccuguguguu

SEQ ID NO: 11217 - RNA, 21 nt, RNAi-antisense strand
cacacagguuccaaaggccuu

SEQ ID NO: 11218 - DNA, 21 bp, Homo sapiens
aacctgtgtgtcacacattgg

SEQ ID NO: 11219 - RNA, 21 nt, RNAi-sense strand
ccugugugucacacauugguu

SEQ ID NO: 11220 - RNA, 21 nt, RNAi-antisense strand
ccaaugugugacacacagguu

SEQ ID NO: 11221 - DNA, 21 bp, Homo sapiens
aaaccaaacagatcagaacac

SEQ ID NO: 11222 - RNA, 21 nt, RNAi-sense strand
accaaacagaucagaacacuu

SEQ ID NO: 11223 - RNA, 21 nt, RNAi-antisense strand
guguucugaucuguuugguuu

SEQ ID NO: 11224 - DNA, 21 bp, Homo sapiens
aaccaaacagatcagaacacg

SEQ ID NO: 11225 - RNA, 21 nt, RNAi-sense strand
ccaaacagaucagaacacguu

SEQ ID NO: 11226 - RNA, 21 nt, RNAi-antisense strand
cguguucugaucuguuugguu

SEQ ID NO: 11227 - DNA, 21 bp, Homo sapiens
aagatcagctgtgacaaggac

SEQ ID NO: 11228 - RNA, 21 nt, RNAi-sense strand
gaucagcugugacaaggacuu

SEQ ID NO: 11229 - RNA, 21 nt, RNAi-antisense strand
guccuugucacagcugaucuu

SEQ ID NO: 11230 - DNA, 21 bp, Homo sapiens
aacactacacttctccttatc

SEQ ID NO: 11231 - RNA, 21 nt, RNAi-sense strand
cacuacacuucuccuuaucuu

SEQ ID NO: 11232 - RNA, 21 nt, RNAi-antisense strand
gauaaggagaaguguaguguu

SEQ ID NO: 11233 - DNA, 21 bp, Homo sapiens
aacactagcttatttccagtt

SEQ ID NO: 11234 - RNA, 21 nt, RNAi-sense strand
cacuagcuuauuuccaguuuu

SEQ ID NO: 11235 - RNA, 21 nt, RNAi-antisense strand
aacuggaaauaagcuaguguu

SEQ ID NO: 11236 - DNA, 21 bp, Homo sapiens
aaagtatggtacatctaccta

SEQ ID NO: 11237 - RNA, 21 nt, RNAi-sense strand
aguaugguacaucuaccuauu

SEQ ID NO: 11238 - RNA, 21 nt, RNAi-antisense strand
uagguagauguaccauacuuu

SEQ ID NO: 11239 - DNA, 21 bp, Homo sapiens
aagtatggtacatctacctaa

SEQ ID NO: 11240 - RNA, 21 nt, RNAi-sense strand
guaugguacaucuaccuaauu

SEQ ID NO: 11241 - RNA, 21 nt, RNAi-antisense strand
uuagguagauguaccauacuu

SEQ ID NO: 11242 - DNA, 21 bp, Homo sapiens
aaatagcatatgccttggagg

SEQ ID NO: 11243 - RNA, 21 nt, RNAi-sense strand
auagcauaugccuuggagguu

SEQ ID NO: 11244 - RNA, 21 nt, RNAi-antisense strand
ccuccaaggcauaugcuauuu

SEQ ID NO: 11245 - DNA, 21 bp, Homo sapiens
aatagcatatgccttggagga

SEQ ID NO: 11246 - RNA, 21 nt, RNAi-sense strand
uagcauaugccuuggaggauu

SEQ ID NO: 11247 - RNA, 21 nt, RNAi-antisense strand
uccuccaaggcauaugcuauu

SEQ ID NO: 11248 - DNA, 21 bp, Homo sapiens
aagtaattcttctgcctcagc

SEQ ID NO: 11249 - RNA, 21 nt, RNAi-sense strand
guaauucuucugccucagcuu

SEQ ID NO: 11250 - RNA, 21 nt, RNAi-antisense strand
gcugaggcagaagaauuacuu

SEQ ID NO: 11251 - DNA, 21 bp, Homo sapiens
aattcttctgcctcagcctcc

SEQ ID NO: 11252 - RNA, 21 nt, RNAi-sense strand
uucuucugccucagccuccuu

SEQ ID NO: 11253 - RNA, 21 nt, RNAi-antisense strand
ggaggcugaggcagaagaauu

SEQ ID NO: 11254 - DNA, 21 bp, Homo sapiens
aacgtgccaccatgactggct

SEQ ID NO: 11255 - RNA, 21 nt, RNAi-sense strand
cgugccaccaugacuggcuuu

SEQ ID NO: 11256 - RNA, 21 nt, RNAi-antisense strand
agccagucaugguggcacguu

SEQ ID NO: 11257 - DNA, 21 bp, Homo sapiens
aatatgatagcttcgcatggt

SEQ ID NO: 11258 - RNA, 21 nt, RNAi-sense strand
uaugauagcuucgcaugguuu

SEQ ID NO: 11259 - RNA, 21 nt, RNAi-antisense strand
accaugcgaagcuaucauauu

SEQ ID NO: 11260 - DNA, 21 bp, Homo sapiens
aatcgcttgagtccaggagtt

SEQ ID NO: 11261 - RNA, 21 nt, RNAi-sense strand
ucgcuugaguccaggaguuuu

SEQ ID NO: 11262 - RNA, 21 nt, RNAi-antisense strand
aacuccuggacucaagcgauu

SEQ ID NO: 11263 - DNA, 21 bp, Homo sapiens
aatgaagctgacaatttatgg

SEQ ID NO: 11264 - RNA, 21 nt, RNAi-sense strand
ugaagcugacaauuuaugguu

SEQ ID NO: 11265 - RNA, 21 nt, RNAi-antisense strand
ccauaaauugucagcuucauu

SEQ ID NO: 11266 - DNA, 21 bp, Homo sapiens
aagctgacaatttatggaagc

SEQ ID NO: 11267 - RNA, 21 nt, RNAi-sense strand
gcugacaauuuauggaagcuu

SEQ ID NO: 11268 - RNA, 21 nt, RNAi-antisense strand
gcuuccauaaauugucagcuu

SEQ ID NO: 11269 - DNA, 21 bp, Homo sapiens
aataatgccaatgaacatctc

SEQ ID NO: 11270 - RNA, 21 nt, RNAi-sense strand
uaaugccaaugaacaucucuu

SEQ ID NO: 11271 - RNA, 21 nt, RNAi-antisense strand
gagauguucauuggcauuauu

SEQ ID NO: 11272 - DNA, 21 bp, Homo sapiens
aatgccaatgaacatctcatg

SEQ ID NO: 11273 - RNA, 21 nt, RNAi-sense strand
ugccaaugaacaucucauguu

SEQ ID NO: 11274 - RNA, 21 nt, RNAi-antisense strand
caugagauguucauuggcauu

SEQ ID NO: 11275 - DNA, 21 bp, Homo sapiens
aatgaacatctcatgtgtgct

SEQ ID NO: 11276 - RNA, 21 nt, RNAi-sense strand
ugaacaucucaugugugcuuu

SEQ ID NO: 11277 - RNA, 21 nt, RNAi-antisense strand
agcacacaugagauguucauu

SEQ ID NO: 11278 - DNA, 21 bp, Homo sapiens
aacatctcatgtgtgctcaca

SEQ ID NO: 11279 - RNA, 21 nt, RNAi-sense strand
caucucaugugugcucacauu

SEQ ID NO: 11280 - RNA, 21 nt, RNAi-antisense strand
ugugagcacacaugagauguu

SEQ ID NO: 11281 - DNA, 21 bp, Homo sapiens
aactttatggagtaggtacca

SEQ ID NO: 11282 - RNA, 21 nt, RNAi-sense strand
cuuuauggaguagguaccauu

SEQ ID NO: 11283 - RNA, 21 nt, RNAi-antisense strand
ugguaccuacuccauaaaguu

SEQ ID NO: 11284 - DNA, 21 bp, Homo sapiens
aacatctgccatttatttcct

SEQ ID NO: 11285 - RNA, 21 nt, RNAi-sense strand
caucugccauuuauuuccuuu

SEQ ID NO: 11286 - RNA, 21 nt, RNAi-antisense strand
aggaaauaaauggcagauguu

SEQ ID NO: 11287 - DNA, 21 bp, Homo sapiens
aacatcaatggctttgtactt

SEQ ID NO: 11288 - RNA, 21 nt, RNAi-sense strand
caucaauggcuuuguacuuuu

SEQ ID NO: 11289 - RNA, 21 nt, RNAi-antisense strand
aaguacaaagccauugauguu

SEQ ID NO: 11290 - DNA, 21 bp, Homo sapiens
aatggctttgtacttgtgatg

SEQ ID NO: 11291 - RNA, 21 nt, RNAi-sense strand
uggcuuuguacuugugauguu

SEQ ID NO: 11292 - RNA, 21 nt, RNAi-antisense strand
caucacaaguacaaagccauu

SEQ ID NO: 11293 - DNA, 21 bp, Homo sapiens
aacacatgcagaataatcctg

SEQ ID NO: 11294 - RNA, 21 nt, RNAi-sense strand
cacaugcagaauaauccuguu

SEQ ID NO: 11295 - RNA, 21 nt, RNAi-antisense strand
caggauuauucugcauguguu

SEQ ID NO: 11296 - DNA, 21 bp, Homo sapiens
aatgtgctctgtacctgtcaa

SEQ ID NO: 11297 - RNA, 21 nt, RNAi-sense strand
ugugcucuguaccugucaauu

SEQ ID NO: 11298 - RNA, 21 nt, RNAi-antisense strand
uugacagguacagagcacauu

SEQ ID NO: 11299 - DNA, 21 bp, Homo sapiens
aatgtacaccacatgctattg

SEQ ID NO: 11300 - RNA, 21 nt, RNAi-sense strand
uguacaccacaugcuauuguu

SEQ ID NO: 11301 - RNA, 21 nt, RNAi-antisense strand
caauagcaugugguguacauu

SEQ ID NO: 11302 - DNA, 21 bp, Homo sapiens
cacagtgagttagcaccacca

SEQ ID NO: 11303 - RNA, 21 nt, RNAi-sense strand
cagugaguuagcaccaccauu

SEQ ID NO: 11304 - RNA, 21 nt, RNAi-antisense strand
ugguggugcuaacucacuguu

SEQ ID NO: 11305 - DNA, 21 bp, Homo sapiens
cagtgagttagcaccaccacc

SEQ ID NO: 11306 - RNA, 21 nt, RNAi-sense strand
gugaguuagcaccaccaccuu

SEQ ID NO: 11307 - RNA, 21 nt, RNAi-antisense strand
ggugguggugcuaacucacuu

SEQ ID NO: 11308 - DNA, 21 bp, Homo sapiens
caccaccaccaggaattggcc

SEQ ID NO: 11309 - RNA, 21 nt, RNAi-sense strand
ccaccaccaggaauuggccuu

SEQ ID NO: 11310 - RNA, 21 nt, RNAi-antisense strand
ggccaauuccugguggugguu

SEQ ID NO: 11311 - DNA, 21 bp, Homo sapiens
caccaccaggaattggccttt

SEQ ID NO: 11312 - RNA, 21 nt, RNAi-sense strand
ccaccaggaauuggccuuuuu

SEQ ID NO: 11313 - RNA, 21 nt, RNAi-antisense strand
aaaggccaauuccuggugguu

SEQ ID NO: 11314 - DNA, 21 bp, Homo sapiens
cagtcaggctggaataagtct

SEQ ID NO: 11315 - RNA, 21 nt, RNAi-sense strand
gucaggcuggaauaagucuuu

SEQ ID NO: 11316 - RNA, 21 nt, RNAi-antisense strand
agacuuauuccagccugacuu

SEQ ID NO: 11317 - DNA, 21 bp, Homo sapiens
caggctggaataagtctcctc

SEQ ID NO: 11318 - RNA, 21 nt, RNAi-sense strand
ggcuggaauaagucuccucuu

SEQ ID NO: 11319 - RNA, 21 nt, RNAi-antisense strand
gaggagacuuauuccagccuu

SEQ ID NO: 11320 - DNA, 21 bp, Homo sapiens
cagccttctgagtcagcctga

SEQ ID NO: 11321 - RNA, 21 nt, RNAi-sense strand
gccuucugagucagccugauu

SEQ ID NO: 11322 - RNA, 21 nt, RNAi-antisense strand
ucaggcugacucagaaggcuu

SEQ ID NO: 11323 - DNA, 21 bp, Homo sapiens
cagcctgaaaggaacaggccg

SEQ ID NO: 11324 - RNA, 21 nt, RNAi-sense strand
gccugaaaggaacaggccguu

SEQ ID NO: 11325 - RNA, 21 nt, RNAi-antisense strand
cggccuguuccuuucaggcuu

SEQ ID NO: 11326 - DNA, 21 bp, Homo sapiens
cagttccagctatgagttcct

SEQ ID NO: 11327 - RNA, 21 nt, RNAi-sense strand
guuccagcuaugaguuccuuu

SEQ ID NO: 11328 - RNA, 21 nt, RNAi-antisense strand
aggaacucauagcuggaacuu

SEQ ID NO: 11329 - DNA, 21 bp, Homo sapiens
cagctatgagttcctgcaact

SEQ ID NO: 11330 - RNA, 21 nt, RNAi-sense strand
gcuaugaguuccugcaacuuu

SEQ ID NO: 11331 - RNA, 21 nt, RNAi-antisense strand
aguugcaggaacucauagcuu

SEQ ID NO: 11332 - DNA, 21 bp, Homo sapiens
caacttcacacatgccacctt

SEQ ID NO: 11333 - RNA, 21 nt, RNAi-sense strand
acuucacacaugccaccuuuu

SEQ ID NO: 11334 - RNA, 21 nt, RNAi-antisense strand
aagguggcaugugugaaguuu

SEQ ID NO: 11335 - DNA, 21 bp, Homo sapiens
cacacatgccacctttgtgct

SEQ ID NO: 11336 - RNA, 21 nt, RNAi-sense strand
cacaugccaccuuugugcuuu

SEQ ID NO: 11337 - RNA, 21 nt, RNAi-antisense strand
agcacaaagguggcauguguu

SEQ ID NO: 11338 - DNA, 21 bp, Homo sapiens
cacatgccacctttgtgctta

SEQ ID NO: 11339 - RNA, 21 nt, RNAi-sense strand
caugccaccuuugugcuuauu

SEQ ID NO: 11340 - RNA, 21 nt, RNAi-antisense strand
uaagcacaaagguggcauguu

SEQ ID NO: 11341 - DNA, 21 bp, Homo sapiens
catgccacctttgtgcttatt

SEQ ID NO: 11342 - RNA, 21 nt, RNAi-sense strand
ugccaccuuugugcuuauuuu

SEQ ID NO: 11343 - RNA, 21 nt, RNAi-antisense strand
aauaagcacaaagguggcauu

SEQ ID NO: 11344 - DNA, 21 bp, Homo sapiens
cacctttgtgcttattggtat

SEQ ID NO: 11345 - RNA, 21 nt, RNAi-sense strand
ccuuugugcuuauugguauuu

SEQ ID NO: 11346 - RNA, 21 nt, RNAi-antisense strand
auaccaauaagcacaaagguu

SEQ ID NO: 11347 - DNA, 21 bp, Homo sapiens
catgtatgtagtggcaatgtt

SEQ ID NO: 11348 - RNA, 21 nt, RNAi-sense strand
uguauguaguggcaauguuuu

SEQ ID NO: 11349 - RNA, 21 nt, RNAi-antisense strand
aacauugccacuacauacauu

SEQ ID NO: 11350 - DNA, 21 bp, Homo sapiens
caatgtttggaaactgcatcg

SEQ ID NO: 11351 - RNA, 21 nt, RNAi-sense strand
auguuuggaaacugcaucguu

SEQ ID NO: 11352 - RNA, 21 nt, RNAi-antisense strand
cgaugcaguuuccaaacauuu

SEQ ID NO: 11353 - DNA, 21 bp, Homo sapiens
catcgtggtcttcatcgtaag

SEQ ID NO: 11354 - RNA, 21 nt, RNAi-sense strand
ucguggucuucaucguaaguu

SEQ ID NO: 11355 - RNA, 21 nt, RNAi-antisense strand
cuuacgaugaagaccacgauu

SEQ ID NO: 11356 - DNA, 21 bp, Homo sapiens
catcgtaaggacggaacgcag

SEQ ID NO: 11357 - RNA, 21 nt, RNAi-sense strand
ucguaaggacggaacgcaguu

SEQ ID NO: 11358 - RNA, 21 nt, RNAi-antisense strand
cugcguuccguccuuacgauu

SEQ ID NO: 11359 - DNA, 21 bp, Homo sapiens
cagcctgcacgctccgatgta

SEQ ID NO: 11360 - RNA, 21 nt, RNAi-sense strand
gccugcacgcuccgauguauu

SEQ ID NO: 11361 - RNA, 21 nt, RNAi-antisense strand
uacaucggagcgugcaggcuu

SEQ ID NO: 11362 - DNA, 21 bp, Homo sapiens
cacgctccgatgtacctcttt

SEQ ID NO: 11363 - RNA, 21 nt, RNAi-sense strand
cgcuccgauguaccucuuuuu

SEQ ID NO: 11364 - RNA, 21 nt, RNAi-antisense strand
aaagagguacaucggagcguu

SEQ ID NO: 11365 - DNA, 21 bp, Homo sapiens
catgcttgcagccattgacct

SEQ ID NO: 11366 - RNA, 21 nt, RNAi-sense strand
ugcuugcagccauugaccuuu

SEQ ID NO: 11367 - RNA, 21 nt, RNAi-antisense strand
aggucaauggcugcaagcauu

SEQ ID NO: 11368 - DNA, 21 bp, Homo sapiens
cagccattgacctggccttat

SEQ ID NO: 11369 - RNA, 21 nt, RNAi-sense strand
gccauugaccuggccuuauuu

SEQ ID NO: 11370 - RNA, 21 nt, RNAi-antisense strand
auaaggccaggucaauggcuu

SEQ ID NO: 11371 - DNA, 21 bp, Homo sapiens
cattgacctggccttatccac

SEQ ID NO: 11372 - RNA, 21 nt, RNAi-sense strand
uugaccuggccuuauccacuu

SEQ ID NO: 11373 - RNA, 21 nt, RNAi-antisense strand
guggauaaggccaggucaauu

SEQ ID NO: 11374 - DNA, 21 bp, Homo sapiens
cacatccaccatgcctaagat

SEQ ID NO: 11375 - RNA, 21 nt, RNAi-sense strand
cauccaccaugccuaagauuu

SEQ ID NO: 11376 - RNA, 21 nt, RNAi-antisense strand
aucuuaggcaugguggauguu

SEQ ID NO: 11377 - DNA, 21 bp, Homo sapiens
catccaccatgcctaagatcc

SEQ ID NO: 11378 - RNA, 21 nt, RNAi-sense strand
uccaccaugccuaagauccuu

SEQ ID NO: 11379 - RNA, 21 nt, RNAi-antisense strand
ggaucuuaggcaugguggauu

SEQ ID NO: 11380 - DNA, 21 bp, Homo sapiens
caccatgcctaagatccttgc

SEQ ID NO: 11381 - RNA, 21 nt, RNAi-sense strand
ccaugccuaagauccuugcuu

SEQ ID NO: 11382 - RNA, 21 nt, RNAi-antisense strand
gcaaggaucuuaggcaugguu

SEQ ID NO: 11383 - DNA, 21 bp, Homo sapiens
cagatgttctttattcatgcc

SEQ ID NO: 11384 - RNA, 21 nt, RNAi-sense strand
gauguucuuuauucaugccuu

SEQ ID NO: 11385 - RNA, 21 nt, RNAi-antisense strand
ggcaugaauaaagaacaucuu

SEQ ID NO: 11386 - DNA, 21 bp, Homo sapiens
cagccattgaatccaccatcc

SEQ ID NO: 11387 - RNA, 21 nt, RNAi-sense strand
gccauugaauccaccauccuu

SEQ ID NO: 11388 - RNA, 21 nt, RNAi-antisense strand
ggaugguggauucaauggcuu

SEQ ID NO: 11389 - DNA, 21 bp, Homo sapiens
cattgaatccaccatcctgct

SEQ ID NO: 11390 - RNA, 21 nt, RNAi-sense strand
uugaauccaccauccugcuuu

SEQ ID NO: 11391 - RNA, 21 nt, RNAi-antisense strand
agcaggaugguggauucaauu

SEQ ID NO: 11392 - DNA, 21 bp, Homo sapiens
catcctgctggccatggcctt

SEQ ID NO: 11393 - RNA, 21 nt, RNAi-sense strand
uccugcuggccauggccuuuu

SEQ ID NO: 11394 - RNA, 21 nt, RNAi-antisense strand
aaggccauggccagcaggauu

SEQ ID NO: 11395 - DNA, 21 bp, Homo sapiens
catggcctttgaccgttatgt

SEQ ID NO: 11396 - RNA, 21 nt, RNAi-sense strand
uggccuuugaccguuauguuu

SEQ ID NO: 11397 - RNA, 21 nt, RNAi-antisense strand
acauaacggucaaaggccauu

SEQ ID NO: 11398 - DNA, 21 bp, Homo sapiens
catgctgcagtgctcaacaat

SEQ ID NO: 11399 - RNA, 21 nt, RNAi-sense strand
ugcugcagugcucaacaauuu

SEQ ID NO: 11400 - RNA, 21 nt, RNAi-antisense strand
auuguugagcacugcagcauu

SEQ ID NO: 11401 - DNA, 21 bp, Homo sapiens
cagtgctcaacaatacagtaa

SEQ ID NO: 11402 - RNA, 21 nt, RNAi-sense strand
gugcucaacaauacaguaauu

SEQ ID NO: 11403 - RNA, 21 nt, RNAi-antisense strand
uuacuguauuguugagcacuu

SEQ ID NO: 11404 - DNA, 21 bp, Homo sapiens
cagattggcatcgtggctgtg

SEQ ID NO: 11405 - RNA, 21 nt, RNAi-sense strand
gauuggcaucguggcuguguu

SEQ ID NO: 11406 - RNA, 21 nt, RNAi-antisense strand
cacagccacgaugccaaucuu

SEQ ID NO: 11407 - DNA, 21 bp, Homo sapiens
cactgcctctgctgatcaagc

SEQ ID NO: 11408 - RNA, 21 nt, RNAi-sense strand
cugccucugcugaucaagcuu

SEQ ID NO: 11409 - RNA, 21 nt, RNAi-antisense strand
gcuugaucagcagaggcaguu

SEQ ID NO: 11410 - DNA, 21 bp, Homo sapiens
cactccaatgtcctctcgcac

SEQ ID NO: 11411 - RNA, 21 nt, RNAi-sense strand
cuccaauguccucucgcacuu

SEQ ID NO: 11412 - RNA, 21 nt, RNAi-antisense strand
gugcgagaggacauuggaguu

SEQ ID NO: 11413 - DNA, 21 bp, Homo sapiens
caatgtcctctcgcactccta

SEQ ID NO: 11414 - RNA, 21 nt, RNAi-sense strand
auguccucucgcacuccuauu

SEQ ID NO: 11415 - RNA, 21 nt, RNAi-antisense strand
uaggagugcgagaggacauuu

SEQ ID NO: 11416 - DNA, 21 bp, Homo sapiens
cactcctattgtgtccaccag

SEQ ID NO: 11417 - RNA, 21 nt, RNAi-sense strand
cuccuauuguguccaccaguu

SEQ ID NO: 11418 - RNA, 21 nt, RNAi-antisense strand
cugguggacacaauaggaguu

SEQ ID NO: 11419 - DNA, 21 bp, Homo sapiens
caccaggatgtaatgaagttg

SEQ ID NO: 11420 - RNA, 21 nt, RNAi-sense strand
ccaggauguaaugaaguuguu

SEQ ID NO: 11421 - RNA, 21 nt, RNAi-antisense strand
caacuucauuacauccugguu

SEQ ID NO: 11422 - DNA, 21 bp, Homo sapiens
caggatgtaatgaagttggcc

SEQ ID NO: 11423 - RNA, 21 nt, RNAi-sense strand
ggauguaaugaaguuggccuu

SEQ ID NO: 11424 - RNA, 21 nt, RNAi-antisense strand
ggccaacuucauuacauccuu

SEQ ID NO: 11425 - DNA, 21 bp, Homo sapiens
caatgtggtatatggtcttac

SEQ ID NO: 11426 - RNA, 21 nt, RNAi-sense strand
augugguauauggucuuacuu

SEQ ID NO: 11427 - RNA, 21 nt, RNAi-antisense strand
guaagaccauauaccacauuu

SEQ ID NO: 11428 - DNA, 21 bp, Homo sapiens
caactgccttccaagtcagag

SEQ ID NO: 11429 - RNA, 21 nt, RNAi-sense strand
acugccuuccaagucagaguu

SEQ ID NO: 11430 - RNA, 21 nt, RNAi-antisense strand
cucugacuuggaaggcaguuu

SEQ ID NO: 11431 - DNA, 21 bp, Homo sapiens
caaggcctttggaacctgtgt

SEQ ID NO: 11432 - RNA, 21 nt, RNAi-sense strand
aggccuuuggaaccuguguuu

SEQ ID NO: 11433 - RNA, 21 nt, RNAi-antisense strand
acacagguuccaaaggccuuu

SEQ ID NO: 11434 - DNA, 21 bp, Homo sapiens
cacacattggtgtggtactcg

SEQ ID NO: 11435 - RNA, 21 nt, RNAi-sense strand
cacauuggugugguacucguu

SEQ ID NO: 11436 - RNA, 21 nt, RNAi-antisense strand
cgaguaccacaccaauguguu

SEQ ID NO: 11437 - DNA, 21 bp, Homo sapiens
cacattggtgtggtactcgcc

SEQ ID NO: 11438 - RNA, 21 nt, RNAi-sense strand
cauuggugugguacucgccuu

SEQ ID NO: 11439 - RNA, 21 nt, RNAi-antisense strand
ggcgaguaccacaccaauguu

SEQ ID NO: 11440 - DNA, 21 bp, Homo sapiens
cattggtgtggtactcgcctt

SEQ ID NO: 11441 - RNA, 21 nt, RNAi-sense strand
uuggugugguacucgccuuuu

SEQ ID NO: 11442 - RNA, 21 nt, RNAi-antisense strand
aaggcgaguaccacaccaauu

SEQ ID NO: 11443 - DNA, 21 bp, Homo sapiens
cacttattggcctctcagttg

SEQ ID NO: 11444 - RNA, 21 nt, RNAi-sense strand
cuuauuggccucucaguuguu

SEQ ID NO: 11445 - RNA, 21 nt, RNAi-antisense strand
caacugagaggccaauaaguu

SEQ ID NO: 11446 - DNA, 21 bp, Homo sapiens
cagttgtacaccgctttggaa

SEQ ID NO: 11447 - RNA, 21 nt, RNAi-sense strand
guuguacaccgcuuuggaauu

SEQ ID NO: 11448 - RNA, 21 nt, RNAi-antisense strand
uuccaaagcgguguacaacuu

SEQ ID NO: 11449 - DNA, 21 bp, Homo sapiens
caccgctttggaaacagcctt

SEQ ID NO: 11450 - RNA, 21 nt, RNAi-sense strand
ccgcuuuggaaacagccuuuu

SEQ ID NO: 11451 - RNA, 21 nt, RNAi-antisense strand
aaggcuguuuccaaagcgguu

SEQ ID NO: 11452 - DNA, 21 bp, Homo sapiens
catctacctgctgctgcctcc

SEQ ID NO: 11453 - RNA, 21 nt, RNAi-sense strand
ucuaccugcugcugccuccuu

SEQ ID NO: 11454 - RNA, 21 nt, RNAi-antisense strand
ggaggcagcagcagguagauu

SEQ ID NO: 11455 - DNA, 21 bp, Homo sapiens
caagatcagctgtgacaagga

SEQ ID NO: 11456 - RNA, 21 nt, RNAi-sense strand
agaucagcugugacaaggauu

SEQ ID NO: 11457 - RNA, 21 nt, RNAi-antisense strand
uccuugucacagcugaucuuu

SEQ ID NO: 11458 - DNA, 21 bp, Homo sapiens
cagctgtgacaaggacttgca

SEQ ID NO: 11459 - RNA, 21 nt, RNAi-sense strand
gcugugacaaggacuugcauu

SEQ ID NO: 11460 - RNA, 21 nt, RNAi-antisense strand
ugcaaguccuugucacagcuu

SEQ ID NO: 11461 - DNA, 21 bp, Homo sapiens
cactacacttctccttatctt

SEQ ID NO: 11462 - RNA, 21 nt, RNAi-sense strand
cuacacuucuccuuaucuuuu

SEQ ID NO: 11463 - RNA, 21 nt, RNAi-antisense strand
aagauaaggagaaguguaguu

SEQ ID NO: 11464 - DNA, 21 bp, Homo sapiens
cacttctccttatctttattg

SEQ ID NO: 11465 - RNA, 21 nt, RNAi-sense strand
cuucuccuuaucuuuauuguu

SEQ ID NO: 11466 - RNA, 21 nt, RNAi-antisense strand
caauaaagauaaggagaaguu

SEQ ID NO: 11467 - DNA, 21 bp, Homo sapiens
cactagcttatttccagttgc

SEQ ID NO: 11468 - RNA, 21 nt, RNAi-sense strand
cuagcuuauuuccaguugcuu

SEQ ID NO: 11469 - RNA, 21 nt, RNAi-antisense strand
gcaacuggaaauaagcuaguu

SEQ ID NO: 11470 - DNA, 21 bp, Homo sapiens
catctacctaaaggactatta

SEQ ID NO: 11471 - RNA, 21 nt, RNAi-sense strand
ucuaccuaaaggacuauuauu

SEQ ID NO: 11472 - RNA, 21 nt, RNAi-antisense strand
uaauaguccuuuagguagauu

SEQ ID NO: 11473 - DNA, 21 bp, Homo sapiens
catgattgaaaccaagttgaa

SEQ ID NO: 11474 - RNA, 21 nt, RNAi-sense strand
ugauugaaaccaaguugaauu

SEQ ID NO: 11475 - RNA, 21 nt, RNAi-antisense strand
uucaacuugguuucaaucauu

SEQ ID NO: 11476 - DNA, 21 bp, Homo sapiens
catatgccttggaggaaatgt

SEQ ID NO: 11477 - RNA, 21 nt, RNAi-sense strand
uaugccuuggaggaaauguuu

SEQ ID NO: 11478 - RNA, 21 nt, RNAi-antisense strand
acauuuccuccaaggcauauu

SEQ ID NO: 11479 - DNA, 21 bp, Homo sapiens
catgttgaagtaattcttctg

SEQ ID NO: 11480 - RNA, 21 nt, RNAi-sense strand
uguugaaguaauucuucuguu

SEQ ID NO: 11481 - RNA, 21 nt, RNAi-antisense strand
cagaagaauuacuucaacauu

SEQ ID NO: 11482 - DNA, 21 bp, Homo sapiens
cagagtttcaccatgttggcc

SEQ ID NO: 11483 - RNA, 21 nt, RNAi-sense strand
gaguuucaccauguuggccuu

SEQ ID NO: 11484 - RNA, 21 nt, RNAi-antisense strand
ggccaacauggugaaacucuu

SEQ ID NO: 11485 - DNA, 21 bp, Homo sapiens
caccatgttggccaggatggt

SEQ ID NO: 11486 - RNA, 21 nt, RNAi-sense strand
ccauguuggccaggaugguuu

SEQ ID NO: 11487 - RNA, 21 nt, RNAi-antisense strand
accauccuggccaacaugguu

SEQ ID NO: 11488 - DNA, 21 bp, Homo sapiens
catgttggccaggatggtctc

SEQ ID NO: 11489 - RNA, 21 nt, RNAi-sense strand
uguuggccaggauggucucuu

SEQ ID NO: 11490 - RNA, 21 nt, RNAi-antisense strand
gagaccauccuggccaacauu

SEQ ID NO: 11491 - DNA, 21 bp, Homo sapiens
caggatggtctcgatctcctg

SEQ ID NO: 11492 - RNA, 21 nt, RNAi-sense strand
ggauggucucgaucuccuguu

SEQ ID NO: 11493 - RNA, 21 nt, RNAi-antisense strand
caggagaucgagaccauccuu

SEQ ID NO: 11494 - DNA, 21 bp, Homo sapiens
catggtggtgtgcacctatag

SEQ ID NO: 11495 - RNA, 21 nt, RNAi-sense strand
ugguggugugcaccuauaguu

SEQ ID NO: 11496 - RNA, 21 nt, RNAi-antisense strand
cuauaggugcacaccaccauu

SEQ ID NO: 11497 - DNA, 21 bp, Homo sapiens
cactgcctggaaagctgaggt

SEQ ID NO: 11498 - RNA, 21 nt, RNAi-sense strand
cugccuggaaagcugagguuu

SEQ ID NO: 11499 - RNA, 21 nt, RNAi-antisense strand
accucagcuuuccaggcaguu

SEQ ID NO: 11500 - DNA, 21 bp, Homo sapiens
caggagtttgaggttacagtg

SEQ ID NO: 11501 - RNA, 21 nt, RNAi-sense strand
ggaguuugagguuacaguguu

SEQ ID NO: 11502 - RNA, 21 nt, RNAi-antisense strand
cacuguaaccucaaacuccuu

SEQ ID NO: 11503 - DNA, 21 bp, Homo sapiens
cagtgatccacgatcgtacca

SEQ ID NO: 11504 - RNA, 21 nt, RNAi-sense strand
gugauccacgaucguaccauu

SEQ ID NO: 11505 - RNA, 21 nt, RNAi-antisense strand
ugguacgaucguggaucacuu

SEQ ID NO: 11506 - DNA, 21 bp, Homo sapiens
cacgatcgtaccactacactc

SEQ ID NO: 11507 - RNA, 21 nt, RNAi-sense strand
cgaucguaccacuacacucuu

SEQ ID NO: 11508 - RNA, 21 nt, RNAi-antisense strand
gaguguagugguacgaucguu

SEQ ID NO: 11509 - DNA, 21 bp, Homo sapiens
cacagtctctactgttattat

SEQ ID NO: 11510 - RNA, 21 nt, RNAi-sense strand
cagucucuacuguuauuauuu

SEQ ID NO: 11511 - RNA, 21 nt, RNAi-antisense strand
auaauaacaguagagacuguu

SEQ ID NO: 11512 - DNA, 21 bp, Homo sapiens
cagtctctactgttattatgc

SEQ ID NO: 11513 - RNA, 21 nt, RNAi-sense strand
gucucuacuguuauuaugcuu

SEQ ID NO: 11514 - RNA, 21 nt, RNAi-antisense strand
gcauaauaacaguagagacuu

SEQ ID NO: 11515 - DNA, 21 bp, Homo sapiens
caatgaacatctcatgtgtgc

SEQ ID NO: 11516 - RNA, 21 nt, RNAi-sense strand
augaacaucucaugugugcuu

SEQ ID NO: 11517 - RNA, 21 nt, RNAi-antisense strand
gcacacaugagauguucauuu

SEQ ID NO: 11518 - DNA, 21 bp, Homo sapiens
catctcatgtgtgctcacaat

SEQ ID NO: 11519 - RNA, 21 nt, RNAi-sense strand
ucucaugugugcucacaauuu

SEQ ID NO: 11520 - RNA, 21 nt, RNAi-antisense strand
auugugagcacacaugagauu

SEQ ID NO: 11521 - DNA, 21 bp, Homo sapiens
catgtgtgctcacaatgttct

SEQ ID NO: 11522 - RNA, 21 nt, RNAi-sense strand
ugugugcucacaauguucuuu

SEQ ID NO: 11523 - RNA, 21 nt, RNAi-antisense strand
agaacauugugagcacacauu

SEQ ID NO: 11524 - DNA, 21 bp, Homo sapiens
cacaatgttctggcactatta

SEQ ID NO: 11525 - RNA, 21 nt, RNAi-sense strand
caauguucuggcacuauuauu

SEQ ID NO: 11526 - RNA, 21 nt, RNAi-antisense strand
uaauagugccagaacauuguu

SEQ ID NO: 11527 - DNA, 21 bp, Homo sapiens
caatgttctggcactattata

SEQ ID NO: 11528 - RNA, 21 nt, RNAi-sense strand
auguucuggcacuauuauauu

SEQ ID NO: 11529 - RNA, 21 nt, RNAi-antisense strand
uauaauagugccagaacauuu

SEQ ID NO: 11530 - DNA, 21 bp, Homo sapiens
cactattataagtgcttcaca

SEQ ID NO: 11531 - RNA, 21 nt, RNAi-sense strand
cuauuauaagugcuucacauu

SEQ ID NO: 11532 - RNA, 21 nt, RNAi-antisense strand
ugugaagcacuuauaauaguu

SEQ ID NO: 11533 - DNA, 21 bp, Homo sapiens
cagttacttaatgaccatgtt

SEQ ID NO: 11534 - RNA, 21 nt, RNAi-sense strand
guuacuuaaugaccauguuuu

SEQ ID NO: 11535 - RNA, 21 nt, RNAi-antisense strand
aacauggucauuaaguaacuu

SEQ ID NO: 11536 - DNA, 21 bp, Homo sapiens
catgttatattgcttcctgtg

SEQ ID NO: 11537 - RNA, 21 nt, RNAi-sense strand
uguuauauugcuuccuguguu

SEQ ID NO: 11538 - RNA, 21 nt, RNAi-antisense strand
cacaggaagcaauauaacauu

SEQ ID NO: 11539 - DNA, 21 bp, Homo sapiens
catctgccatttatttcctca

SEQ ID NO: 11540 - RNA, 21 nt, RNAi-sense strand
ucugccauuuauuuccucauu

SEQ ID NO: 11541 - RNA, 21 nt, RNAi-antisense strand
ugaggaaauaaauggcagauu

SEQ ID NO: 11542 - DNA, 21 bp, Homo sapiens
catttatttcctcagctgtac

SEQ ID NO: 11543 - RNA, 21 nt, RNAi-sense strand
uuuauuuccucagcuguacuu

SEQ ID NO: 11544 - RNA, 21 nt, RNAi-antisense strand
guacagcugaggaaauaaauu

SEQ ID NO: 11545 - DNA, 21 bp, Homo sapiens
cagctgtacaaatcctctgtt

SEQ ID NO: 11546 - RNA, 21 nt, RNAi-sense strand
gcuguacaaauccucuguuuu

SEQ ID NO: 11547 - RNA, 21 nt, RNAi-antisense strand
aacagaggauuuguacagcuu

SEQ ID NO: 11548 - DNA, 21 bp, Homo sapiens
cacactaacatcaatggcttt

SEQ ID NO: 11549 - RNA, 21 nt, RNAi-sense strand
cacuaacaucaauggcuuuuu

SEQ ID NO: 11550 - RNA, 21 nt, RNAi-antisense strand
aaagccauugauguuaguguu

SEQ ID NO: 11551 - DNA, 21 bp, Homo sapiens
cactaacatcaatggctttgt

SEQ ID NO: 11552 - RNA, 21 nt, RNAi-sense strand
cuaacaucaauggcuuuguuu

SEQ ID NO: 11553 - RNA, 21 nt, RNAi-antisense strand
acaaagccauugauguuaguu

SEQ ID NO: 11554 - DNA, 21 bp, Homo sapiens
catcaatggctttgtacttgt

SEQ ID NO: 11555 - RNA, 21 nt, RNAi-sense strand
ucaauggcuuuguacuuguuu

SEQ ID NO: 11556 - RNA, 21 nt, RNAi-antisense strand
acaaguacaaagccauugauu

SEQ ID NO: 11557 - DNA, 21 bp, Homo sapiens
caatggctttgtacttgtgat

SEQ ID NO: 11558 - RNA, 21 nt, RNAi-sense strand
auggcuuuguacuugugauuu

SEQ ID NO: 11559 - RNA, 21 nt, RNAi-antisense strand
aucacaaguacaaagccauuu

SEQ ID NO: 11560 - DNA, 21 bp, Homo sapiens
caacacatgcagaataatcct

SEQ ID NO: 11561 - RNA, 21 nt, RNAi-sense strand
acacaugcagaauaauccuuu

SEQ ID NO: 11562 - RNA, 21 nt, RNAi-antisense strand
aggauuauucugcauguguuu

SEQ ID NO: 11563 - DNA, 21 bp, Homo sapiens
cacatgcagaataatcctgtt

SEQ ID NO: 11564 - RNA, 21 nt, RNAi-sense strand
caugcagaauaauccuguuuu

SEQ ID NO: 11565 - RNA, 21 nt, RNAi-antisense strand
aacaggauuauucugcauguu

SEQ ID NO: 11566 - DNA, 21 bp, Homo sapiens
cagctgcctttcgtgatctta

SEQ ID NO: 11567 - RNA, 21 nt, RNAi-sense strand
gcugccuuucgugaucuuauu

SEQ ID NO: 11568 - RNA, 21 nt, RNAi-antisense strand
uaagaucacgaaaggcagcuu

SEQ ID NO: 11569 - DNA, 21 bp, Homo sapiens
catctccttgatcatgtcttc

SEQ ID NO: 11570 - RNA, 21 nt, RNAi-sense strand
ucuccuugaucaugucuucuu

SEQ ID NO: 11571 - RNA, 21 nt, RNAi-antisense strand
gaagacaugaucaaggagauu

SEQ ID NO: 11572 - DNA, 21 bp, Homo sapiens
caccacatgctattgtctgaa

SEQ ID NO: 11573 - RNA, 21 nt, RNAi-sense strand
ccacaugcuauugucugaauu

SEQ ID NO: 11574 - RNA, 21 nt, RNAi-antisense strand
uucagacaauagcaugugguu

SEQ ID NO: 11575 - DNA, 21 bp, Homo sapiens
cacatgctattgtctgaacct

SEQ ID NO: 11576 - RNA, 21 nt, RNAi-sense strand
caugcuauugucugaaccuuu

SEQ ID NO: 11577 - RNA, 21 nt, RNAi-antisense strand
agguucagacaauagcauguu

SEQ ID NO: 11578 - DNA, 21 bp, Homo sapiens
catgctattgtctgaacctga

SEQ ID NO: 11579 - RNA, 21 nt, RNAi-sense strand
ugcuauugucugaaccugauu

SEQ ID NO: 11580 - RNA, 21 nt, RNAi-antisense strand
ucagguucagacaauagcauu

SEQ ID NO: 11581 - DNA, 21 bp, Homo sapiens
gaagacacagtgagttagcac

SEQ ID NO: 11582 - RNA, 21 nt, RNAi-sense strand
agacacagugaguuagcacuu

SEQ ID NO: 11583 - RNA, 21 nt, RNAi-antisense strand
gugcuaacucacugugucuuu

SEQ ID NO: 11584 - DNA, 21 bp, Homo sapiens
gacacagtgagttagcaccac

SEQ ID NO: 11585 - RNA, 21 nt, RNAi-sense strand
cacagugaguuagcaccacuu

SEQ ID NO: 11586 - RNA, 21 nt, RNAi-antisense strand
guggugcuaacucacuguguu

SEQ ID NO: 11587 - DNA, 21 bp, Homo sapiens
gagttagcaccaccaccagga

SEQ ID NO: 11588 - RNA, 21 nt, RNAi-sense strand
guuagcaccaccaccaggauu

SEQ ID NO: 11589 - RNA, 21 nt, RNAi-antisense strand
uccuggugguggugcuaacuu

SEQ ID NO: 11590 - DNA, 21 bp, Homo sapiens
gaataagtctcctcatatttg

SEQ ID NO: 11591 - RNA, 21 nt, RNAi-sense strand
auaagucuccucauauuuguu

SEQ ID NO: 11592 - RNA, 21 nt, RNAi-antisense strand
caaauaugaggagacuuauuu

SEQ ID NO: 11593 - DNA, 21 bp, Homo sapiens
gaatctaaagcctcctcagcc

SEQ ID NO: 11594 - RNA, 21 nt, RNAi-sense strand
aucuaaagccuccucagccuu

SEQ ID NO: 11595 - RNA, 21 nt, RNAi-antisense strand
ggcugaggaggcuuuagauuu

SEQ ID NO: 11596 - DNA, 21 bp, Homo sapiens
gagtcagcctgaaaggaacag

SEQ ID NO: 11597 - RNA, 21 nt, RNAi-sense strand
gucagccugaaaggaacaguu

SEQ ID NO: 11598 - RNA, 21 nt, RNAi-antisense strand
cuguuccuuucaggcugacuu

SEQ ID NO: 11599 - DNA, 21 bp, Homo sapiens
gaaaggaacaggccgaactgc

SEQ ID NO: 11600 - RNA, 21 nt, RNAi-sense strand
aaggaacaggccgaacugcuu

SEQ ID NO: 11601 - RNA, 21 nt, RNAi-antisense strand
gcaguucggccuguuccuuuu

SEQ ID NO: 11602 - DNA, 21 bp, Homo sapiens
gaacaggccgaactgctgtat

SEQ ID NO: 11603 - RNA, 21 nt, RNAi-sense strand
acaggccgaacugcuguauuu

SEQ ID NO: 11604 - RNA, 21 nt, RNAi-antisense strand
auacagcaguucggccuguuu

SEQ ID NO: 11605 - DNA, 21 bp, Homo sapiens
gagttcctgcaacttcacaca

SEQ ID NO: 11606 - RNA, 21 nt, RNAi-sense strand
guuccugcaacuucacacauu

SEQ ID NO: 11607 - RNA, 21 nt, RNAi-antisense strand
ugugugaaguugcaggaacuu

SEQ ID NO: 11608 - DNA, 21 bp, Homo sapiens
gaaactgcatcgtggtcttca

SEQ ID NO: 11609 - RNA, 21 nt, RNAi-sense strand
aacugcaucguggucuucauu

SEQ ID NO: 11610 - RNA, 21 nt, RNAi-antisense strand
ugaagaccacgaugcaguuuu

SEQ ID NO: 11611 - DNA, 21 bp, Homo sapiens
gatgtacctctttctctgcat

SEQ ID NO: 11612 - RNA, 21 nt, RNAi-sense strand
uguaccucuuucucugcauuu

SEQ ID NO: 11613 - RNA, 21 nt, RNAi-antisense strand
augcagagaaagagguacauu

SEQ ID NO: 11614 - DNA, 21 bp, Homo sapiens
gacctggccttatccacatcc

SEQ ID NO: 11615 - RNA, 21 nt, RNAi-sense strand
ccuggccuuauccacauccuu

SEQ ID NO: 11616 - RNA, 21 nt, RNAi-antisense strand
ggauguggauaaggccagguu

SEQ ID NO: 11617 - DNA, 21 bp, Homo sapiens
gagagattagctttgaggcct

SEQ ID NO: 11618 - RNA, 21 nt, RNAi-sense strand
gagauuagcuuugaggccuuu

SEQ ID NO: 11619 - RNA, 21 nt, RNAi-antisense strand
aggccucaaagcuaaucucuu

SEQ ID NO: 11620 - DNA, 21 bp, Homo sapiens
gagattagctttgaggcctgt

SEQ ID NO: 11621 - RNA, 21 nt, RNAi-sense strand
gauuagcuuugaggccuguuu

SEQ ID NO: 11622 - RNA, 21 nt, RNAi-antisense strand
acaggccucaaagcuaaucuu

SEQ ID NO: 11623 - DNA, 21 bp, Homo sapiens
gattagctttgaggcctgtct

SEQ ID NO: 11624 - RNA, 21 nt, RNAi-sense strand
uuagcuuugaggccugucuuu

SEQ ID NO: 11625 - RNA, 21 nt, RNAi-antisense strand
agacaggccucaaagcuaauu

SEQ ID NO: 11626 - DNA, 21 bp, Homo sapiens
gaatccaccatcctgctggcc

SEQ ID NO: 11627 - RNA, 21 nt, RNAi-sense strand
auccaccauccugcuggccuu

SEQ ID NO: 11628 - RNA, 21 nt, RNAi-antisense strand
ggccagcaggaugguggauuu

SEQ ID NO: 11629 - DNA, 21 bp, Homo sapiens
gaccgttatgtggccatctgc

SEQ ID NO: 11630 - RNA, 21 nt, RNAi-sense strand
ccguuauguggccaucugcuu

SEQ ID NO: 11631 - RNA, 21 nt, RNAi-antisense strand
gcagauggccacauaacgguu

SEQ ID NO: 11632 - DNA, 21 bp, Homo sapiens
gattggcatcgtggctgtggt

SEQ ID NO: 11633 - RNA, 21 nt, RNAi-sense strand
uuggcaucguggcugugguuu

SEQ ID NO: 11634 - RNA, 21 nt, RNAi-antisense strand
accacagccacgaugccaauu

SEQ ID NO: 11635 - DNA, 21 bp, Homo sapiens
gatcaagcggctggccttctg

SEQ ID NO: 11636 - RNA, 21 nt, RNAi-sense strand
ucaagcggcuggccuucuguu

SEQ ID NO: 11637 - RNA, 21 nt, RNAi-antisense strand
cagaaggccagccgcuugauu

SEQ ID NO: 11638 - DNA, 21 bp, Homo sapiens
gatgtaatgaagttggcctat

SEQ ID NO: 11639 - RNA, 21 nt, RNAi-sense strand
uguaaugaaguuggccuauuu

SEQ ID NO: 11640 - RNA, 21 nt, RNAi-antisense strand
auaggccaacuucauuacauu

SEQ ID NO: 11641 - DNA, 21 bp, Homo sapiens
gaagttggcctatgcagacac

SEQ ID NO: 11642 - RNA, 21 nt, RNAi-sense strand
aguuggccuaugcagacacuu

SEQ ID NO: 11643 - RNA, 21 nt, RNAi-antisense strand
gugucugcauaggccaacuuu

SEQ ID NO: 11644 - DNA, 21 bp, Homo sapiens
gacgtaatgttcatctccttg

SEQ ID NO: 11645 - RNA, 21 nt, RNAi-sense strand
cguaauguucaucuccuuguu

SEQ ID NO: 11646 - RNA, 21 nt, RNAi-antisense strand
caaggagaugaacauuacguu

SEQ ID NO: 11647 - DNA, 21 bp, Homo sapiens
gataatacgaacggttctgca

SEQ ID NO: 11648 - RNA, 21 nt, RNAi-sense strand
uaauacgaacgguucugcauu

SEQ ID NO: 11649 - RNA, 21 nt, RNAi-antisense strand
ugcagaaccguucguauuauu

SEQ ID NO: 11650 - DNA, 21 bp, Homo sapiens
gaacggttctgcaactgcctt

SEQ ID NO: 11651 - RNA, 21 nt, RNAi-sense strand
acgguucugcaacugccuuuu

SEQ ID NO: 11652 - RNA, 21 nt, RNAi-antisense strand
aaggcaguugcagaaccguuu

SEQ ID NO: 11653 - DNA, 21 bp, Homo sapiens
gaacctgtgtgtcacacattg

SEQ ID NO: 11654 - RNA, 21 nt, RNAi-sense strand
accugugugucacacauuguu

SEQ ID NO: 11655 - RNA, 21 nt, RNAi-antisense strand
caaugugugacacacagguuu

SEQ ID NO: 11656 - DNA, 21 bp, Homo sapiens
gacatctacctgctgctgcct

SEQ ID NO: 11657 - RNA, 21 nt, RNAi-sense strand
caucuaccugcugcugccuuu

SEQ ID NO: 11658 - RNA, 21 nt, RNAi-antisense strand
aggcagcagcagguagauguu

SEQ ID NO: 11659 - DNA, 21 bp, Homo sapiens
gatcagctgtgacaaggactt

SEQ ID NO: 11660 - RNA, 21 nt, RNAi-sense strand
ucagcugugacaaggacuuuu

SEQ ID NO: 11661 - RNA, 21 nt, RNAi-antisense strand
aaguccuugucacagcugauu

SEQ ID NO: 11662 - DNA, 21 bp, Homo sapiens
gacaaggacttgcaggctgtg

SEQ ID NO: 11663 - RNA, 21 nt, RNAi-sense strand
caaggacuugcaggcuguguu

SEQ ID NO: 11664 - RNA, 21 nt, RNAi-antisense strand
cacagccugcaaguccuuguu

SEQ ID NO: 11665 - DNA, 21 bp, Homo sapiens
gatacatgattgaaaccaagt

SEQ ID NO: 11666 - RNA, 21 nt, RNAi-sense strand
uacaugauugaaaccaaguuu

SEQ ID NO: 11667 - RNA, 21 nt, RNAi-antisense strand
acuugguuucaaucauguauu

SEQ ID NO: 11668 - DNA, 21 bp, Homo sapiens
gaggaaatgtgctcaaattac

SEQ ID NO: 11669 - RNA, 21 nt, RNAi-sense strand
ggaaaugugcucaaauuacuu

SEQ ID NO: 11670 - RNA, 21 nt, RNAi-antisense strand
guaauuugagcacauuuccuu

SEQ ID NO: 11671 - DNA, 21 bp, Homo sapiens
gatctcggctcactgcaacct

SEQ ID NO: 11672 - RNA, 21 nt, RNAi-sense strand
ucucggcucacugcaaccuuu

SEQ ID NO: 11673 - RNA, 21 nt, RNAi-antisense strand
agguugcagugagccgagauu

SEQ ID NO: 11674 - DNA, 21 bp, Homo sapiens
gaagtaattcttctgcctcag

SEQ ID NO: 11675 - RNA, 21 nt, RNAi-sense strand
aguaauucuucugccucaguu

SEQ ID NO: 11676 - RNA, 21 nt, RNAi-antisense strand
cugaggcagaagaauuacuuu

SEQ ID NO: 11677 - DNA, 21 bp, Homo sapiens
gactagaggaacgtgccacca

SEQ ID NO: 11678 - RNA, 21 nt, RNAi-sense strand
cuagaggaacgugccaccauu

SEQ ID NO: 11679 - RNA, 21 nt, RNAi-antisense strand
ugguggcacguuccucuaguu

SEQ ID NO: 11680 - DNA, 21 bp, Homo sapiens
gaggaacgtgccaccatgact

SEQ ID NO: 11681 - RNA, 21 nt, RNAi-sense strand
ggaacgugccaccaugacuuu

SEQ ID NO: 11682 - RNA, 21 nt, RNAi-antisense strand
agucaugguggcacguuccuu

SEQ ID NO: 11683 - DNA, 21 bp, Homo sapiens
gaacgtgccaccatgactggc

SEQ ID NO: 11684 - RNA, 21 nt, RNAi-sense strand
acgugccaccaugacuggcuu

SEQ ID NO: 11685 - RNA, 21 nt, RNAi-antisense strand
gccagucaugguggcacguuu

SEQ ID NO: 11686 - DNA, 21 bp, Homo sapiens
gagacagagtttcaccatgtt

SEQ ID NO: 11687 - RNA, 21 nt, RNAi-sense strand
gacagaguuucaccauguuuu

SEQ ID NO: 11688 - RNA, 21 nt, RNAi-antisense strand
aacauggugaaacucugucuu

SEQ ID NO: 11689 - DNA, 21 bp, Homo sapiens
gacagagtttcaccatgttgg

SEQ ID NO: 11690 - RNA, 21 nt, RNAi-sense strand
cagaguuucaccauguugguu

SEQ ID NO: 11691 - RNA, 21 nt, RNAi-antisense strand
ccaacauggugaaacucuguu

SEQ ID NO: 11692 - DNA, 21 bp, Homo sapiens
gagtttcaccatgttggccag

SEQ ID NO: 11693 - RNA, 21 nt, RNAi-sense strand
guuucaccauguuggccaguu

SEQ ID NO: 11694 - RNA, 21 nt, RNAi-antisense strand
cuggccaacauggugaaacuu

SEQ ID NO: 11695 - DNA, 21 bp, Homo sapiens
gatggtctcgatctcctgacc

SEQ ID NO: 11696 - RNA, 21 nt, RNAi-sense strand
uggucucgaucuccugaccuu

SEQ ID NO: 11697 - RNA, 21 nt, RNAi-antisense strand
ggucaggagaucgagaccauu

SEQ ID NO: 11698 - DNA, 21 bp, Homo sapiens
gatctcctgaccttgtgatcc

SEQ ID NO: 11699 - RNA, 21 nt, RNAi-sense strand
ucuccugaccuugugauccuu

SEQ ID NO: 11700 - RNA, 21 nt, RNAi-antisense strand
ggaucacaaggucaggagauu

SEQ ID NO: 11701 - DNA, 21 bp, Homo sapiens
gattacaggtgtgaaccactg

SEQ ID NO: 11702 - RNA, 21 nt, RNAi-sense strand
uuacaggugugaaccacuguu

SEQ ID NO: 11703 - RNA, 21 nt, RNAi-antisense strand
cagugguucacaccuguaauu

SEQ ID NO: 11704 - DNA, 21 bp, Homo sapiens
gaatatgatagcttcgcatgg

SEQ ID NO: 11705 - RNA, 21 nt, RNAi-sense strand
auaugauagcuucgcaugguu

SEQ ID NO: 11706 - RNA, 21 nt, RNAi-antisense strand
ccaugcgaagcuaucauauuu

SEQ ID NO: 11707 - DNA, 21 bp, Homo sapiens
gatagcttcgcatggtggtgt

SEQ ID NO: 11708 - RNA, 21 nt, RNAi-sense strand
uagcuucgcauggugguguuu

SEQ ID NO: 11709 - RNA, 21 nt, RNAi-antisense strand
acaccaccaugcgaagcuauu

SEQ ID NO: 11710 - DNA, 21 bp, Homo sapiens
gagaatcgcttgagtccagga

SEQ ID NO: 11711 - RNA, 21 nt, RNAi-sense strand
gaaucgcuugaguccaggauu

SEQ ID NO: 11712 - RNA, 21 nt, RNAi-antisense strand
uccuggacucaagcgauucuu

SEQ ID NO: 11713 - DNA, 21 bp, Homo sapiens
gaatcgcttgagtccaggagt

SEQ ID NO: 11714 - RNA, 21 nt, RNAi-sense strand
aucgcuugaguccaggaguuu

SEQ ID NO: 11715 - RNA, 21 nt, RNAi-antisense strand
acuccuggacucaagcgauuu

SEQ ID NO: 11716 - DNA, 21 bp, Homo sapiens
gagtccaggagtttgaggtta

SEQ ID NO: 11717 - RNA, 21 nt, RNAi-sense strand
guccaggaguuugagguuauu

SEQ ID NO: 11718 - RNA, 21 nt, RNAi-antisense strand
uaaccucaaacuccuggacuu

SEQ ID NO: 11719 - DNA, 21 bp, Homo sapiens
gagtttgaggttacagtgatc

SEQ ID NO: 11720 - RNA, 21 nt, RNAi-sense strand
guuugagguuacagugaucuu

SEQ ID NO: 11721 - RNA, 21 nt, RNAi-antisense strand
gaucacuguaaccucaaacuu

SEQ ID NO: 11722 - DNA, 21 bp, Homo sapiens
gaggttacagtgatccacgat

SEQ ID NO: 11723 - RNA, 21 nt, RNAi-sense strand
gguuacagugauccacgauuu

SEQ ID NO: 11724 - RNA, 21 nt, RNAi-antisense strand
aucguggaucacuguaaccuu

SEQ ID NO: 11725 - DNA, 21 bp, Homo sapiens
gatccacgatcgtaccactac

SEQ ID NO: 11726 - RNA, 21 nt, RNAi-sense strand
uccacgaucguaccacuacuu

SEQ ID NO: 11727 - RNA, 21 nt, RNAi-antisense strand
guagugguacgaucguggauu

SEQ ID NO: 11728 - DNA, 21 bp, Homo sapiens
gatcgtaccactacactccag

SEQ ID NO: 11729 - RNA, 21 nt, RNAi-sense strand
ucguaccacuacacuccaguu

SEQ ID NO: 11730 - RNA, 21 nt, RNAi-antisense strand
cuggaguguagugguacgauu

SEQ ID NO: 11731 - DNA, 21 bp, Homo sapiens
gaagctgacaatttatggaag

SEQ ID NO: 11732 - RNA, 21 nt, RNAi-sense strand
agcugacaauuuauggaaguu

SEQ ID NO: 11733 - RNA, 21 nt, RNAi-antisense strand
cuuccauaaauugucagcuuu

SEQ ID NO: 11734 - DNA, 21 bp, Homo sapiens
gaacatctcatgtgtgctcac

SEQ ID NO: 11735 - RNA, 21 nt, RNAi-sense strand
acaucucaugugugcucacuu

SEQ ID NO: 11736 - RNA, 21 nt, RNAi-antisense strand
gugagcacacaugagauguuu

SEQ ID NO: 11737 - DNA, 21 bp, Homo sapiens
gagtaggtaccatttgtgtct

SEQ ID NO: 11738 - RNA, 21 nt, RNAi-sense strand
guagguaccauuugugucuuu

SEQ ID NO: 11739 - RNA, 21 nt, RNAi-antisense strand
agacacaaaugguaccuacuu

SEQ ID NO: 11740 - DNA, 21 bp, Homo sapiens
gactaaagtcacacggcttgt

SEQ ID NO: 11741 - RNA, 21 nt, RNAi-sense strand
cuaaagucacacggcuuguuu

SEQ ID NO: 11742 - RNA, 21 nt, RNAi-antisense strand
acaagccgugugacuuuaguu

SEQ ID NO: 11743 - DNA, 21 bp, Homo sapiens
gatggttgaatacagttactt

SEQ ID NO: 11744 - RNA, 21 nt, RNAi-sense strand
ugguugaauacaguuacuuuu

SEQ ID NO: 11745 - RNA, 21 nt, RNAi-antisense strand
aaguaacuguauucaaccauu

SEQ ID NO: 11746 - DNA, 21 bp, Homo sapiens
gaatacagttacttaatgacc

SEQ ID NO: 11747 - RNA, 21 nt, RNAi-sense strand
auacaguuacuuaaugaccuu

SEQ ID NO: 11748 - RNA, 21 nt, RNAi-antisense strand
ggucauuaaguaacuguauuu

SEQ ID NO: 11749 - DNA, 21 bp, Homo sapiens
gaccatgttatattgcttcct

SEQ ID NO: 11750 - RNA, 21 nt, RNAi-sense strand
ccauguuauauugcuuccuuu

SEQ ID NO: 11751 - RNA, 21 nt, RNAi-antisense strand
aggaagcaauauaacaugguu

SEQ ID NO: 11752 - DNA, 21 bp, Homo sapiens
gagaatgttgttgtctatttg

SEQ ID NO: 11753 - RNA, 21 nt, RNAi-sense strand
gaauguuguugucuauuuguu

SEQ ID NO: 11754 - RNA, 21 nt, RNAi-antisense strand
caaauagacaacaacauucuu

SEQ ID NO: 11755 - DNA, 21 bp, Homo sapiens
gaatgttgttgtctatttgtc

SEQ ID NO: 11756 - RNA, 21 nt, RNAi-sense strand
auguuguugucuauuugucuu

SEQ ID NO: 11757 - RNA, 21 nt, RNAi-antisense strand
gacaaauagacaacaacauuu

SEQ ID NO: 11758 - DNA, 21 bp, Homo sapiens
gaatgtacaccacatgctatt

SEQ ID NO: 11759 - RNA, 21 nt, RNAi-sense strand
auguacaccacaugcuauuuu

SEQ ID NO: 11760 - RNA, 21 nt, RNAi-antisense strand
aauagcaugugguguacauuu

SEQ ID NO: 11761 - DNA, 21 bp, Homo sapiens
tagcaccaccaccaggaattg

SEQ ID NO: 11762 - RNA, 21 nt, RNAi-sense strand
gcaccaccaccaggaauuguu

SEQ ID NO: 11763 - RNA, 21 nt, RNAi-antisense strand
caauuccuggugguggugcuu

SEQ ID NO: 11764 - DNA, 21 bp, Homo sapiens
tagctctgtgcctgtctccag

SEQ ID NO: 11765 - RNA, 21 nt, RNAi-sense strand
gcucugugccugucuccaguu

SEQ ID NO: 11766 - RNA, 21 nt, RNAi-antisense strand
cuggagacaggcacagagcuu

SEQ ID NO: 11767 - DNA, 21 bp, Homo sapiens
taagtctcctcatatttgcaa

SEQ ID NO: 11768 - RNA, 21 nt, RNAi-sense strand
agucuccucauauuugcaauu

SEQ ID NO: 11769 - RNA, 21 nt, RNAi-antisense strand
uugcaaauaugaggagacuuu

SEQ ID NO: 11770 - DNA, 21 bp, Homo sapiens
taaagcctcctcagccttctg

SEQ ID NO: 11771 - RNA, 21 nt, RNAi-sense strand
aagccuccucagccuucuguu

SEQ ID NO: 11772 - RNA, 21 nt, RNAi-antisense strand
cagaaggcugaggaggcuuuu

SEQ ID NO: 11773 - DNA, 21 bp, Homo sapiens
tactgccagtgtgacctcacc

SEQ ID NO: 11774 - RNA, 21 nt, RNAi-sense strand
cugccagugugaccucaccuu

SEQ ID NO: 11775 - RNA, 21 nt, RNAi-antisense strand
ggugaggucacacuggcaguu

SEQ ID NO: 11776 - DNA, 21 bp, Homo sapiens
tatgagttcctgcaacttcac

SEQ ID NO: 11777 - RNA, 21 nt, RNAi-sense strand
ugaguuccugcaacuucacuu

SEQ ID NO: 11778 - RNA, 21 nt, RNAi-antisense strand
gugaaguugcaggaacucauu

SEQ ID NO: 11779 - DNA, 21 bp, Homo sapiens
tatgtagtggcaatgtttgga

SEQ ID NO: 11780 - RNA, 21 nt, RNAi-sense strand
uguaguggcaauguuuggauu

SEQ ID NO: 11781 - RNA, 21 nt, RNAi-antisense strand
uccaaacauugccacuacauu

SEQ ID NO: 11782 - DNA, 21 bp, Homo sapiens
tagtggcaatgtttggaaact

SEQ ID NO: 11783 - RNA, 21 nt, RNAi-sense strand
guggcaauguuuggaaacuuu

SEQ ID NO: 11784 - RNA, 21 nt, RNAi-antisense strand
aguuuccaaacauugccacuu

SEQ ID NO: 11785 - DNA, 21 bp, Homo sapiens
taaggacggaacgcagcctgc

SEQ ID NO: 11786 - RNA, 21 nt, RNAi-sense strand
aggacggaacgcagccugcuu

SEQ ID NO: 11787 - RNA, 21 nt, RNAi-antisense strand
gcaggcugcguuccguccuuu

SEQ ID NO: 11788 - DNA, 21 bp, Homo sapiens
tacctctttctctgcatgctt

SEQ ID NO: 11789 - RNA, 21 nt, RNAi-sense strand
ccucuuucucugcaugcuuuu

SEQ ID NO: 11790 - RNA, 21 nt, RNAi-antisense strand
aagcaugcagagaaagagguu

SEQ ID NO: 11791 - DNA, 21 bp, Homo sapiens
tatccacatccaccatgccta

SEQ ID NO: 11792 - RNA, 21 nt, RNAi-sense strand
uccacauccaccaugccuauu

SEQ ID NO: 11793 - RNA, 21 nt, RNAi-antisense strand
uaggcaugguggauguggauu

SEQ ID NO: 11794 - DNA, 21 bp, Homo sapiens
tagctttgaggcctgtcttac

SEQ ID NO: 11795 - RNA, 21 nt, RNAi-sense strand
gcuuugaggccugucuuacuu

SEQ ID NO: 11796 - RNA, 21 nt, RNAi-antisense strand
guaagacaggccucaaagcuu

SEQ ID NO: 11797 - DNA, 21 bp, Homo sapiens
tattgtgtccaccaggatgta

SEQ ID NO: 11798 - RNA, 21 nt, RNAi-sense strand
uuguguccaccaggauguauu

SEQ ID NO: 11799 - RNA, 21 nt, RNAi-antisense strand
uacauccugguggacacaauu

SEQ ID NO: 11800 - DNA, 21 bp, Homo sapiens
taatgaagttggcctatgcag

SEQ ID NO: 11801 - RNA, 21 nt, RNAi-sense strand
augaaguuggccuaugcaguu

SEQ ID NO: 11802 - RNA, 21 nt, RNAi-antisense strand
cugcauaggccaacuucauuu

SEQ ID NO: 11803 - DNA, 21 bp, Homo sapiens
tatatggtcttactgccattc

SEQ ID NO: 11804 - RNA, 21 nt, RNAi-sense strand
uauggucuuacugccauucuu

SEQ ID NO: 11805 - RNA, 21 nt, RNAi-antisense strand
gaauggcaguaagaccauauu

SEQ ID NO: 11806 - DNA, 21 bp, Homo sapiens
tatggtcttactgccattctg

SEQ ID NO: 11807 - RNA, 21 nt, RNAi-sense strand
uggucuuacugccauucuguu

SEQ ID NO: 11808 - RNA, 21 nt, RNAi-antisense strand
cagaauggcaguaagaccauu

SEQ ID NO: 11809 - DNA, 21 bp, Homo sapiens
tactgccattctgctggtcat

SEQ ID NO: 11810 - RNA, 21 nt, RNAi-sense strand
cugccauucugcuggucauuu

SEQ ID NO: 11811 - RNA, 21 nt, RNAi-antisense strand
augaccagcagaauggcaguu

SEQ ID NO: 11812 - DNA, 21 bp, Homo sapiens
taatgttcatctccttgtcct

SEQ ID NO: 11813 - RNA, 21 nt, RNAi-sense strand
auguucaucuccuuguccuuu

SEQ ID NO: 11814 - RNA, 21 nt, RNAi-antisense strand
aggacaaggagaugaacauuu

SEQ ID NO: 11815 - DNA, 21 bp, Homo sapiens
taatacgaacggttctgcaac

SEQ ID NO: 11816 - RNA, 21 nt, RNAi-sense strand
auacgaacgguucugcaacuu

SEQ ID NO: 11817 - RNA, 21 nt, RNAi-antisense strand
guugcagaaccguucguauuu

SEQ ID NO: 11818 - DNA, 21 bp, Homo sapiens
tacgaacggttctgcaactgc

SEQ ID NO: 11819 - RNA, 21 nt, RNAi-sense strand
cgaacgguucugcaacugcuu

SEQ ID NO: 11820 - RNA, 21 nt, RNAi-antisense strand
gcaguugcagaaccguucguu

SEQ ID NO: 11821 - DNA, 21 bp, Homo sapiens
tactcgccttctatgtgccac

SEQ ID NO: 11822 - RNA, 21 nt, RNAi-sense strand
cucgccuucuaugugccacuu

SEQ ID NO: 11823 - RNA, 21 nt, RNAi-antisense strand
guggcacauagaaggcgaguu

SEQ ID NO: 11824 - DNA, 21 bp, Homo sapiens
tatgtgccacttattggcctc

SEQ ID NO: 11825 - RNA, 21 nt, RNAi-sense strand
ugugccacuuauuggccucuu

SEQ ID NO: 11826 - RNA, 21 nt, RNAi-antisense strand
gaggccaauaaguggcacauu

SEQ ID NO: 11827 - DNA, 21 bp, Homo sapiens
tattggcctctcagttgtaca

SEQ ID NO: 11828 - RNA, 21 nt, RNAi-sense strand
uuggccucucaguuguacauu

SEQ ID NO: 11829 - RNA, 21 nt, RNAi-antisense strand
uguacaacugagaggccaauu

SEQ ID NO: 11830 - DNA, 21 bp, Homo sapiens
tacaccgctttggaaacagcc

SEQ ID NO: 11831 - RNA, 21 nt, RNAi-sense strand
caccgcuuuggaaacagccuu

SEQ ID NO: 11832 - RNA, 21 nt, RNAi-antisense strand
ggcuguuuccaaagcgguguu

SEQ ID NO: 11833 - DNA, 21 bp, Homo sapiens
tacctgctgctgcctcctgtc

SEQ ID NO: 11834 - RNA, 21 nt, RNAi-sense strand
ccugcugcugccuccugucuu

SEQ ID NO: 11835 - RNA, 21 nt, RNAi-antisense strand
gacaggaggcagcagcagguu

SEQ ID NO: 11836 - DNA, 21 bp, Homo sapiens
tatgttcaagatcagctgtga

SEQ ID NO: 11837 - RNA, 21 nt, RNAi-sense strand
uguucaagaucagcugugauu

SEQ ID NO: 11838 - RNA, 21 nt, RNAi-antisense strand
ucacagcugaucuugaacauu

SEQ ID NO: 11839 - DNA, 21 bp, Homo sapiens
taacactacacttctccttat

SEQ ID NO: 11840 - RNA, 21 nt, RNAi-sense strand
acacuacacuucuccuuauuu

SEQ ID NO: 11841 - RNA, 21 nt, RNAi-antisense strand
auaaggagaaguguaguguuu

SEQ ID NO: 11842 - DNA, 21 bp, Homo sapiens
taacactagcttatttccagt

SEQ ID NO: 11843 - RNA, 21 nt, RNAi-sense strand
acacuagcuuauuuccaguuu

SEQ ID NO: 11844 - RNA, 21 nt, RNAi-antisense strand
acuggaaauaagcuaguguuu

SEQ ID NO: 11845 - DNA, 21 bp, Homo sapiens
taaagtatggtacatctacct

SEQ ID NO: 11846 - RNA, 21 nt, RNAi-sense strand
aaguaugguacaucuaccuuu

SEQ ID NO: 11847 - RNA, 21 nt, RNAi-antisense strand
agguagauguaccauacuuuu

SEQ ID NO: 11848 - DNA, 21 bp, Homo sapiens
tatggtacatctacctaaagg

SEQ ID NO: 11849 - RNA, 21 nt, RNAi-sense strand
ugguacaucuaccuaaagguu

SEQ ID NO: 11850 - RNA, 21 nt, RNAi-antisense strand
ccuuuagguagauguaccauu

SEQ ID NO: 11851 - DNA, 21 bp, Homo sapiens
tacatctacctaaaggactat

SEQ ID NO: 11852 - RNA, 21 nt, RNAi-sense strand
caucuaccuaaaggacuauuu

SEQ ID NO: 11853 - RNA, 21 nt, RNAi-antisense strand
auaguccuuuagguagauguu

SEQ ID NO: 11854 - DNA, 21 bp, Homo sapiens
tacctaaaggactattatgtg

SEQ ID NO: 11855 - RNA, 21 nt, RNAi-sense strand
ccuaaaggacuauuauguguu

SEQ ID NO: 11856 - RNA, 21 nt, RNAi-antisense strand
cacauaauaguccuuuagguu

SEQ ID NO: 11857 - DNA, 21 bp, Homo sapiens
tacatgattgaaaccaagttg

SEQ ID NO: 11858 - RNA, 21 nt, RNAi-sense strand
caugauugaaaccaaguuguu

SEQ ID NO: 11859 - RNA, 21 nt, RNAi-antisense strand
caacuugguuucaaucauguu

SEQ ID NO: 11860 - DNA, 21 bp, Homo sapiens
tagcatatgccttggaggaaa

SEQ ID NO: 11861 - RNA, 21 nt, RNAi-sense strand
gcauaugccuuggaggaaauu

SEQ ID NO: 11862 - RNA, 21 nt, RNAi-antisense strand
uuuccuccaaggcauaugcuu

SEQ ID NO: 11863 - DNA, 21 bp, Homo sapiens
tatgccttggaggaaatgtgc

SEQ ID NO: 11864 - RNA, 21 nt, RNAi-sense strand
ugccuuggaggaaaugugcuu

SEQ ID NO: 11865 - RNA, 21 nt, RNAi-antisense strand
gcacauuuccuccaaggcauu

SEQ ID NO: 11866 - DNA, 21 bp, Homo sapiens
tattatggttagctgtcacat

SEQ ID NO: 11867 - RNA, 21 nt, RNAi-sense strand
uuaugguuagcugucacauuu

SEQ ID NO: 11868 - RNA, 21 nt, RNAi-antisense strand
augugacagcuaaccauaauu

SEQ ID NO: 11869 - DNA, 21 bp, Homo sapiens
tatggttagctgtcacataca

SEQ ID NO: 11870 - RNA, 21 nt, RNAi-sense strand
ugguuagcugucacauacauu

SEQ ID NO: 11871 - RNA, 21 nt, RNAi-antisense strand
uguaugugacagcuaaccauu

SEQ ID NO: 11872 - DNA, 21 bp, Homo sapiens
taattcttctgcctcagcctc

SEQ ID NO: 11873 - RNA, 21 nt, RNAi-sense strand
auucuucugccucagccucuu

SEQ ID NO: 11874 - RNA, 21 nt, RNAi-antisense strand
gaggcugaggcagaagaauuu

SEQ ID NO: 11875 - DNA, 21 bp, Homo sapiens
tagaggaacgtgccaccatga

SEQ ID NO: 11876 - RNA, 21 nt, RNAi-sense strand
gaggaacgugccaccaugauu

SEQ ID NO: 11877 - RNA, 21 nt, RNAi-antisense strand
ucaugguggcacguuccucuu

SEQ ID NO: 11878 - DNA, 21 bp, Homo sapiens
tagtagagacagagtttcacc

SEQ ID NO: 11879 - RNA, 21 nt, RNAi-sense strand
guagagacagaguuucaccuu

SEQ ID NO: 11880 - RNA, 21 nt, RNAi-antisense strand
ggugaaacucugucucuacuu

SEQ ID NO: 11881 - DNA, 21 bp, Homo sapiens
tagagacagagtttcaccatg

SEQ ID NO: 11882 - RNA, 21 nt, RNAi-sense strand
gagacagaguuucaccauguu

SEQ ID NO: 11883 - RNA, 21 nt, RNAi-antisense strand
cauggugaaacucugucucuu

SEQ ID NO: 11884 - DNA, 21 bp, Homo sapiens
tacaggtgtgaaccactgtgc

SEQ ID NO: 11885 - RNA, 21 nt, RNAi-sense strand
caggugugaaccacugugcuu

SEQ ID NO: 11886 - RNA, 21 nt, RNAi-antisense strand
gcacagugguucacaccuguu

SEQ ID NO: 11887 - DNA, 21 bp, Homo sapiens
tatgatagcttcgcatggtgg

SEQ ID NO: 11888 - RNA, 21 nt, RNAi-sense strand
ugauagcuucgcauggugguu

SEQ ID NO: 11889 - RNA, 21 nt, RNAi-antisense strand
ccaccaugcgaagcuaucauu

SEQ ID NO: 11890 - DNA, 21 bp, Homo sapiens
tagcttcgcatggtggtgtgc

SEQ ID NO: 11891 - RNA, 21 nt, RNAi-sense strand
gcuucgcaugguggugugcuu

SEQ ID NO: 11892 - RNA, 21 nt, RNAi-antisense strand
gcacaccaccaugcgaagcuu

SEQ ID NO: 11893 - DNA, 21 bp, Homo sapiens
tacagtgatccacgatcgtac

SEQ ID NO: 11894 - RNA, 21 nt, RNAi-sense strand
cagugauccacgaucguacuu

SEQ ID NO: 11895 - RNA, 21 nt, RNAi-antisense strand
guacgaucguggaucacuguu

SEQ ID NO: 11896 - DNA, 21 bp, Homo sapiens
taccactacactccagcctgg

SEQ ID NO: 11897 - RNA, 21 nt, RNAi-sense strand
ccacuacacuccagccugguu

SEQ ID NO: 11898 - RNA, 21 nt, RNAi-antisense strand
ccaggcuggaguguagugguu

SEQ ID NO: 11899 - DNA, 21 bp, Homo sapiens
taatgccaatgaacatctcat

SEQ ID NO: 11900 - RNA, 21 nt, RNAi-sense strand
augccaaugaacaucucauuu

SEQ ID NO: 11901 - RNA, 21 nt, RNAi-antisense strand
augagauguucauuggcauuu

SEQ ID NO: 11902 - DNA, 21 bp, Homo sapiens
tattataagtgcttcacaggt

SEQ ID NO: 11903 - RNA, 21 nt, RNAi-sense strand
uuauaagugcuucacagguuu

SEQ ID NO: 11904 - RNA, 21 nt, RNAi-antisense strand
accugugaagcacuuauaauu

SEQ ID NO: 11905 - DNA, 21 bp, Homo sapiens
taactttatggagtaggtacc

SEQ ID NO: 11906 - RNA, 21 nt, RNAi-sense strand
acuuuauggaguagguaccuu

SEQ ID NO: 11907 - RNA, 21 nt, RNAi-antisense strand
gguaccuacuccauaaaguuu

SEQ ID NO: 11908 - DNA, 21 bp, Homo sapiens
tatggagtaggtaccatttgt

SEQ ID NO: 11909 - RNA, 21 nt, RNAi-sense strand
uggaguagguaccauuuguuu

SEQ ID NO: 11910 - RNA, 21 nt, RNAi-antisense strand
acaaaugguaccuacuccauu

SEQ ID NO: 11911 - DNA, 21 bp, Homo sapiens
taggtaccatttgtgtctctt

SEQ ID NO: 11912 - RNA, 21 nt, RNAi-sense strand
gguaccauuugugucucuuuu

SEQ ID NO: 11913 - RNA, 21 nt, RNAi-antisense strand
aagagacacaaaugguaccuu

SEQ ID NO: 11914 - DNA, 21 bp, Homo sapiens
tacagttacttaatgaccatg

SEQ ID NO: 11915 - RNA, 21 nt, RNAi-sense strand
caguuacuuaaugaccauguu

SEQ ID NO: 11916 - RNA, 21 nt, RNAi-antisense strand
cauggucauuaaguaacuguu

SEQ ID NO: 11917 - DNA, 21 bp, Homo sapiens
tatattgcttcctgtgtaaca

SEQ ID NO: 11918 - RNA, 21 nt, RNAi-sense strand
uauugcuuccuguguaacauu

SEQ ID NO: 11919 - RNA, 21 nt, RNAi-antisense strand
uguuacacaggaagcaauauu

SEQ ID NO: 11920 - DNA, 21 bp, Homo sapiens
tattgcttcctgtgtaacatc

SEQ ID NO: 11921 - RNA, 21 nt, RNAi-sense strand
uugcuuccuguguaacaucuu

SEQ ID NO: 11922 - RNA, 21 nt, RNAi-antisense strand
gauguuacacaggaagcaauu

SEQ ID NO: 11923 - DNA, 21 bp, Homo sapiens
taacatctgccatttatttcc

SEQ ID NO: 11924 - RNA, 21 nt, RNAi-sense strand
acaucugccauuuauuuccuu

SEQ ID NO: 11925 - RNA, 21 nt, RNAi-antisense strand
ggaaauaaauggcagauguuu

SEQ ID NO: 11926 - DNA, 21 bp, Homo sapiens
tatttcctcagctgtacaaat

SEQ ID NO: 11927 - RNA, 21 nt, RNAi-sense strand
uuuccucagcuguacaaauuu

SEQ ID NO: 11928 - RNA, 21 nt, RNAi-antisense strand
auuuguacagcugaggaaauu

SEQ ID NO: 11929 - DNA, 21 bp, Homo sapiens
tacacactaacatcaatggct

SEQ ID NO: 11930 - RNA, 21 nt, RNAi-sense strand
cacacuaacaucaauggcuuu

SEQ ID NO: 11931 - RNA, 21 nt, RNAi-antisense strand
agccauugauguuaguguguu

SEQ ID NO: 11932 - DNA, 21 bp, Homo sapiens
taacatcaatggctttgtact

SEQ ID NO: 11933 - RNA, 21 nt, RNAi-sense strand
acaucaauggcuuuguacuuu

SEQ ID NO: 11934 - RNA, 21 nt, RNAi-antisense strand
aguacaaagccauugauguuu

SEQ ID NO: 11935 - DNA, 21 bp, Homo sapiens
tacttgtgatgagagataacc

SEQ ID NO: 11936 - RNA, 21 nt, RNAi-sense strand
cuugugaugagagauaaccuu

SEQ ID NO: 11937 - RNA, 21 nt, RNAi-antisense strand
gguuaucucucaucacaaguu

SEQ ID NO: 11938 - DNA, 21 bp, Homo sapiens
tacagctgcctttcgtgatct

SEQ ID NO: 11939 - RNA, 21 nt, RNAi-sense strand
cagcugccuuucgugaucuuu

SEQ ID NO: 11940 - RNA, 21 nt, RNAi-antisense strand
agaucacgaaaggcagcuguu

SEQ ID NO: 11941 - DNA, 21 bp, Homo sapiens
tatttgtctcttacatctcct

SEQ ID NO: 11942 - RNA, 21 nt, RNAi-sense strand
uuugucucuuacaucuccuuu

SEQ ID NO: 11943 - RNA, 21 nt, RNAi-antisense strand
aggagauguaagagacaaauu

SEQ ID NO: 11944 - DNA, 21 bp, Homo sapiens
tacatctccttgatcatgtct

SEQ ID NO: 11945 - RNA, 21 nt, RNAi-sense strand
caucuccuugaucaugucuuu

SEQ ID NO: 11946 - RNA, 21 nt, RNAi-antisense strand
agacaugaucaaggagauguu

SEQ ID NO: 11947 - DNA, 21 bp, Homo sapiens
taatgtgctctgtacctgtca

SEQ ID NO: 11948 - RNA, 21 nt, RNAi-sense strand
augugcucuguaccugucauu

SEQ ID NO: 11949 - RNA, 21 nt, RNAi-antisense strand
ugacagguacagagcacauuu

SEQ ID NO: 11950 - DNA, 21 bp, Homo sapiens
tacaccacatgctattgtctg

SEQ ID NO: 11951 - RNA, 21 nt, RNAi-sense strand
caccacaugcuauugucuguu

SEQ ID NO: 11952 - RNA, 21 nt, RNAi-antisense strand
cagacaauagcaugugguguu

SEQ ID NO: 11953 - DNA, 21 bp, Homo sapiens
tattgtctgaacctgagtata

SEQ ID NO: 11954 - RNA, 21 nt, RNAi-sense strand
uugucugaaccugaguauauu

SEQ ID NO: 11955 - RNA, 21 nt, RNAi-antisense strand
uauacucagguucagacaauu

SEQ ID NO: 11956 - DNA, 21 bp, Homo sapiens
aagaagcacagaattcctcaa

SEQ ID NO: 11957 - RNA, 21 nt, RNAi-sense strand
gaagcacagaauuccucaauu

SEQ ID NO: 11958 - RNA, 21 nt, RNAi-antisense strand
uugaggaauucugugcuucuu

SEQ ID NO: 11959 - DNA, 21 bp, Homo sapiens
aagcacagaattcctcaactc

SEQ ID NO: 11960 - RNA, 21 nt, RNAi-sense strand
gcacagaauuccucaacucuu

SEQ ID NO: 11961 - RNA, 21 nt, RNAi-antisense strand
gaguugaggaauucugugcuu

SEQ ID NO: 11962 - DNA, 21 bp, Homo sapiens
aaggaggtggagctcatcctt

SEQ ID NO: 11963 - RNA, 21 nt, RNAi-sense strand
ggagguggagcucauccuuuu

SEQ ID NO: 11964 - RNA, 21 nt, RNAi-antisense strand
aaggaugagcuccaccuccuu

SEQ ID NO: 11965 - DNA, 21 bp, Homo sapiens
aaggagcagaacggagtgcag

SEQ ID NO: 11966 - RNA, 21 nt, RNAi-sense strand
ggagcagaacggagugcaguu

SEQ ID NO: 11967 - RNA, 21 nt, RNAi-antisense strand
cugcacuccguucugcuccuu

SEQ ID NO: 11968 - DNA, 21 bp, Homo sapiens
aacggagtgcagctcaccagc

SEQ ID NO: 11969 - RNA, 21 nt, RNAi-sense strand
cggagugcagcucaccagcuu

SEQ ID NO: 11970 - RNA, 21 nt, RNAi-antisense strand
gcuggugagcugcacuccguu

SEQ ID NO: 11971 - DNA, 21 bp, Homo sapiens
aagaagatcgactttctcctg

SEQ ID NO: 11972 - RNA, 21 nt, RNAi-sense strand
gaagaucgacuuucuccuguu

SEQ ID NO: 11973 - RNA, 21 nt, RNAi-antisense strand
caggagaaagucgaucuucuu

SEQ ID NO: 11974 - DNA, 21 bp, Homo sapiens
aagatcgactttctcctgtcc

SEQ ID NO: 11975 - RNA, 21 nt, RNAi-sense strand
gaucgacuuucuccuguccuu

SEQ ID NO: 11976 - RNA, 21 nt, RNAi-antisense strand
ggacaggagaaagucgaucuu

SEQ ID NO: 11977 - DNA, 21 bp, Homo sapiens
aaatggtggcggtgccttcct

SEQ ID NO: 11978 - RNA, 21 nt, RNAi-sense strand
augguggcggugccuuccuuu

SEQ ID NO: 11979 - RNA, 21 nt, RNAi-antisense strand
aggaaggcaccgccaccauuu

SEQ ID NO: 11980 - DNA, 21 bp, Homo sapiens
aatggtggcggtgccttcctg

SEQ ID NO: 11981 - RNA, 21 nt, RNAi-sense strand
ugguggcggugccuuccuguu

SEQ ID NO: 11982 - RNA, 21 nt, RNAi-antisense strand
caggaaggcaccgccaccauu

SEQ ID NO: 11983 - DNA, 21 bp, Homo sapiens
aaggtggtatggatcacagcc

SEQ ID NO: 11984 - RNA, 21 nt, RNAi-sense strand
ggugguauggaucacagccuu

SEQ ID NO: 11985 - RNA, 21 nt, RNAi-antisense strand
ggcugugauccauaccaccuu

SEQ ID NO: 11986 - DNA, 21 bp, Homo sapiens
aacaagttcaccaacaactgc

SEQ ID NO: 11987 - RNA, 21 nt, RNAi-sense strand
caaguucaccaacaacugcuu

SEQ ID NO: 11988 - RNA, 21 nt, RNAi-antisense strand
gcaguuguuggugaacuuguu

SEQ ID NO: 11989 - DNA, 21 bp, Homo sapiens
aagttcaccaacaactgctac

SEQ ID NO: 11990 - RNA, 21 nt, RNAi-sense strand
guucaccaacaacugcuacuu

SEQ ID NO: 11991 - RNA, 21 nt, RNAi-antisense strand
guagcaguuguuggugaacuu

SEQ ID NO: 11992 - DNA, 21 bp, Homo sapiens
aacggtggcatctacgtcttc

SEQ ID NO: 11993 - RNA, 21 nt, RNAi-sense strand
cgguggcaucuacgucuucuu

SEQ ID NO: 11994 - RNA, 21 nt, RNAi-antisense strand
gaagacguagaugccaccguu

SEQ ID NO: 11995 - DNA, 21 bp, Homo sapiens
aagccatcggagtggcctggt

SEQ ID NO: 11996 - RNA, 21 nt, RNAi-sense strand
gccaucggaguggccugguuu

SEQ ID NO: 11997 - RNA, 21 nt, RNAi-antisense strand
accaggccacuccgauggcuu

SEQ ID NO: 11998 - DNA, 21 bp, Homo sapiens
aaactggcctacgccattgca

SEQ ID NO: 11999 - RNA, 21 nt, RNAi-sense strand
acuggccuacgccauugcauu

SEQ ID NO: 12000 - RNA, 21 nt, RNAi-antisense strand
ugcaauggcguaggccaguuu

SEQ ID NO: 12001 - DNA, 21 bp, Homo sapiens
aactggcctacgccattgcac

SEQ ID NO: 12002 - RNA, 21 nt, RNAi-sense strand
cuggccuacgccauugcacuu

SEQ ID NO: 12003 - RNA, 21 nt, RNAi-antisense strand
gugcaauggcguaggccaguu

SEQ ID NO: 12004 - DNA, 21 bp, Homo sapiens
aaggaccgtgagctggtggac

SEQ ID NO: 12005 - RNA, 21 nt, RNAi-sense strand
ggaccgugagcugguggacuu

SEQ ID NO: 12006 - RNA, 21 nt, RNAi-antisense strand
guccaccagcucacgguccuu

SEQ ID NO: 12007 - DNA, 21 bp, Homo sapiens
aacaaaccaaggaaatctaag

SEQ ID NO: 12008 - RNA, 21 nt, RNAi-sense strand
caaaccaaggaaaucuaaguu

SEQ ID NO: 12009 - RNA, 21 nt, RNAi-antisense strand
cuuagauuuccuugguuuguu

SEQ ID NO: 12010 - DNA, 21 bp, Homo sapiens
aaccaaggaaatctaagtttc

SEQ ID NO: 12011 - RNA, 21 nt, RNAi-sense strand
ccaaggaaaucuaaguuucuu

SEQ ID NO: 12012 - RNA, 21 nt, RNAi-antisense strand
gaaacuuagauuuccuugguu

SEQ ID NO: 12013 - DNA, 21 bp, Homo sapiens
aaggaaatctaagtttcgaga

SEQ ID NO: 12014 - RNA, 21 nt, RNAi-sense strand
ggaaaucuaaguuucgagauu

SEQ ID NO: 12015 - RNA, 21 nt, RNAi-antisense strand
ucucgaaacuuagauuuccuu

SEQ ID NO: 12016 - DNA, 21 bp, Homo sapiens
aatctaagtttcgagagaaag

SEQ ID NO: 12017 - RNA, 21 nt, RNAi-sense strand
ucuaaguuucgagagaaaguu

SEQ ID NO: 12018 - RNA, 21 nt, RNAi-antisense strand
cuuucucucgaaacuuagauu

SEQ ID NO: 12019 - DNA, 21 bp, Homo sapiens
aacttctactcttcaacctct

SEQ ID NO: 12020 - RNA, 21 nt, RNAi-sense strand
cuucuacucuucaaccucuuu

SEQ ID NO: 12021 - RNA, 21 nt, RNAi-antisense strand
agagguugaagaguagaaguu

SEQ ID NO: 12022 - DNA, 21 bp, Homo sapiens
aaacacaaacaacaaagcaga

SEQ ID NO: 12023 - RNA, 21 nt, RNAi-sense strand
acacaaacaacaaagcagauu

SEQ ID NO: 12024 - RNA, 21 nt, RNAi-antisense strand
ucugcuuuguuguuuguguuu

SEQ ID NO: 12025 - DNA, 21 bp, Homo sapiens
aacacaaacaacaaagcagaa

SEQ ID NO: 12026 - RNA, 21 nt, RNAi-sense strand
cacaaacaacaaagcagaauu

SEQ ID NO: 12027 - RNA, 21 nt, RNAi-antisense strand
uucugcuuuguuguuuguguu

SEQ ID NO: 12028 - DNA, 21 bp, Homo sapiens
aaacaacaaagcagaagactc

SEQ ID NO: 12029 - RNA, 21 nt, RNAi-sense strand
acaacaaagcagaagacucuu

SEQ ID NO: 12030 - RNA, 21 nt, RNAi-antisense strand
gagucuucugcuuuguuguuu

SEQ ID NO: 12031 - DNA, 21 bp, Homo sapiens
aacaacaaagcagaagactcc

SEQ ID NO: 12032 - RNA, 21 nt, RNAi-sense strand
caacaaagcagaagacuccuu

SEQ ID NO: 12033 - RNA, 21 nt, RNAi-antisense strand
ggagucuucugcuuuguuguu

SEQ ID NO: 12034 - DNA, 21 bp, Homo sapiens
aacaaagcagaagactcctct

SEQ ID NO: 12035 - RNA, 21 nt, RNAi-sense strand
caaagcagaagacuccucuuu

SEQ ID NO: 12036 - RNA, 21 nt, RNAi-antisense strand
agaggagucuucugcuuuguu

SEQ ID NO: 12037 - DNA, 21 bp, Homo sapiens
aaagcagaagactcctctctt

SEQ ID NO: 12038 - RNA, 21 nt, RNAi-sense strand
agcagaagacuccucucuuuu

SEQ ID NO: 12039 - RNA, 21 nt, RNAi-antisense strand
aagagaggagucuucugcuuu

SEQ ID NO: 12040 - DNA, 21 bp, Homo sapiens
aagcagaagactcctctcttc

SEQ ID NO: 12041 - RNA, 21 nt, RNAi-sense strand
gcagaagacuccucucuucuu

SEQ ID NO: 12042 - RNA, 21 nt, RNAi-antisense strand
gaagagaggagucuucugcuu

SEQ ID NO: 12043 - DNA, 21 bp, Homo sapiens
aagactcctctcttctgactg

SEQ ID NO: 12044 - RNA, 21 nt, RNAi-sense strand
gacuccucucuucugacuguu

SEQ ID NO: 12045 - RNA, 21 nt, RNAi-antisense strand
cagucagaagagaggagucuu

SEQ ID NO: 12046 - DNA, 21 bp, Homo sapiens
aataacgacgtagatctgtgc

SEQ ID NO: 12047 - RNA, 21 nt, RNAi-sense strand
uaacgacguagaucugugcuu

SEQ ID NO: 12048 - RNA, 21 nt, RNAi-antisense strand
gcacagaucuacgucguuauu

SEQ ID NO: 12049 - DNA, 21 bp, Homo sapiens
aacgacgtagatctgtgcagc

SEQ ID NO: 12050 - RNA, 21 nt, RNAi-sense strand
cgacguagaucugugcagcuu

SEQ ID NO: 12051 - RNA, 21 nt, RNAi-antisense strand
gcugcacagaucuacgucguu

SEQ ID NO: 12052 - DNA, 21 bp, Homo sapiens
aaacgtctaacttcatgctgt

SEQ ID NO: 12053 - RNA, 21 nt, RNAi-sense strand
acgucuaacuucaugcuguuu

SEQ ID NO: 12054 - RNA, 21 nt, RNAi-antisense strand
acagcaugaaguuagacguuu

SEQ ID NO: 12055 - DNA, 21 bp, Homo sapiens
aacgtctaacttcatgctgtc

SEQ ID NO: 12056 - RNA, 21 nt, RNAi-sense strand
cgucuaacuucaugcugucuu

SEQ ID NO: 12057 - RNA, 21 nt, RNAi-antisense strand
gacagcaugaaguuagacguu

SEQ ID NO: 12058 - DNA, 21 bp, Homo sapiens
aacttcatgctgtctgtgtga

SEQ ID NO: 12059 - RNA, 21 nt, RNAi-sense strand
cuucaugcugucugugugauu

SEQ ID NO: 12060 - RNA, 21 nt, RNAi-antisense strand
ucacacagacagcaugaaguu

SEQ ID NO: 12061 - DNA, 21 bp, Homo sapiens
aaagccaagtgtcctgcttgg

SEQ ID NO: 12062 - RNA, 21 nt, RNAi-sense strand
agccaaguguccugcuugguu

SEQ ID NO: 12063 - RNA, 21 nt, RNAi-antisense strand
ccaagcaggacacuuggcuuu

SEQ ID NO: 12064 - DNA, 21 bp, Homo sapiens
aagccaagtgtcctgcttggt

SEQ ID NO: 12065 - RNA, 21 nt, RNAi-sense strand
gccaaguguccugcuugguuu

SEQ ID NO: 12066 - RNA, 21 nt, RNAi-antisense strand
accaagcaggacacuuggcuu

SEQ ID NO: 12067 - DNA, 21 bp, Homo sapiens
aagtgtcctgcttggtttagc

SEQ ID NO: 12068 - RNA, 21 nt, RNAi-sense strand
guguccugcuugguuuagcuu

SEQ ID NO: 12069 - RNA, 21 nt, RNAi-antisense strand
gcuaaaccaagcaggacacuu

SEQ ID NO: 12070 - DNA, 21 bp, Homo sapiens
aaggtgaaatggaggaaacca

SEQ ID NO: 12071 - RNA, 21 nt, RNAi-sense strand
ggugaaauggaggaaaccauu

SEQ ID NO: 12072 - RNA, 21 nt, RNAi-antisense strand
ugguuuccuccauuucaccuu

SEQ ID NO: 12073 - DNA, 21 bp, Homo sapiens
aaatggaggaaaccacaaatt

SEQ ID NO: 12074 - RNA, 21 nt, RNAi-sense strand
auggaggaaaccacaaauuuu

SEQ ID NO: 12075 - RNA, 21 nt, RNAi-antisense strand
aauuugugguuuccuccauuu

SEQ ID NO: 12076 - DNA, 21 bp, Homo sapiens
aatggaggaaaccacaaattc

SEQ ID NO: 12077 - RNA, 21 nt, RNAi-sense strand
uggaggaaaccacaaauucuu

SEQ ID NO: 12078 - RNA, 21 nt, RNAi-antisense strand
gaauuugugguuuccuccauu

SEQ ID NO: 12079 - DNA, 21 bp, Homo sapiens
aaaccacaaattcatgcaaag

SEQ ID NO: 12080 - RNA, 21 nt, RNAi-sense strand
accacaaauucaugcaaaguu

SEQ ID NO: 12081 - RNA, 21 nt, RNAi-antisense strand
cuuugcaugaauuugugguuu

SEQ ID NO: 12082 - DNA, 21 bp, Homo sapiens
aaccacaaattcatgcaaagt

SEQ ID NO: 12083 - RNA, 21 nt, RNAi-sense strand
ccacaaauucaugcaaaguuu

SEQ ID NO: 12084 - RNA, 21 nt, RNAi-antisense strand
acuuugcaugaauuugugguu

SEQ ID NO: 12085 - DNA, 21 bp, Homo sapiens
aaattcatgcaaagtcctttc

SEQ ID NO: 12086 - RNA, 21 nt, RNAi-sense strand
auucaugcaaaguccuuucuu

SEQ ID NO: 12087 - RNA, 21 nt, RNAi-antisense strand
gaaaggacuuugcaugaauuu

SEQ ID NO: 12088 - DNA, 21 bp, Homo sapiens
aattcatgcaaagtcctttcc

SEQ ID NO: 12089 - RNA, 21 nt, RNAi-sense strand
uucaugcaaaguccuuuccuu

SEQ ID NO: 12090 - RNA, 21 nt, RNAi-antisense strand
ggaaaggacuuugcaugaauu

SEQ ID NO: 12091 - DNA, 21 bp, Homo sapiens
aaattgagcgttcagttgaca

SEQ ID NO: 12092 - RNA, 21 nt, RNAi-sense strand
auugagcguucaguugacauu

SEQ ID NO: 12093 - RNA, 21 nt, RNAi-antisense strand
ugucaacugaacgcucaauuu

SEQ ID NO: 12094 - DNA, 21 bp, Homo sapiens
aattgagcgttcagttgacac

SEQ ID NO: 12095 - RNA, 21 nt, RNAi-sense strand
uugagcguucaguugacacuu

SEQ ID NO: 12096 - RNA, 21 nt, RNAi-antisense strand
gugucaacugaacgcucaauu

SEQ ID NO: 12097 - DNA, 21 bp, Homo sapiens
aaactccttgaaaccagctca

SEQ ID NO: 12098 - RNA, 21 nt, RNAi-sense strand
acuccuugaaaccagcucauu

SEQ ID NO: 12099 - RNA, 21 nt, RNAi-antisense strand
ugagcugguuucaaggaguuu

SEQ ID NO: 12100 - DNA, 21 bp, Homo sapiens
aactccttgaaaccagctcag

SEQ ID NO: 12101 - RNA, 21 nt, RNAi-sense strand
cuccuugaaaccagcucaguu

SEQ ID NO: 12102 - RNA, 21 nt, RNAi-antisense strand
cugagcugguuucaaggaguu

SEQ ID NO: 12103 - DNA, 21 bp, Homo sapiens
aaaccagctcaggctactgcc

SEQ ID NO: 12104 - RNA, 21 nt, RNAi-sense strand
accagcucaggcuacugccuu

SEQ ID NO: 12105 - RNA, 21 nt, RNAi-antisense strand
ggcaguagccugagcugguuu

SEQ ID NO: 12106 - DNA, 21 bp, Homo sapiens
aaccagctcaggctactgcca

SEQ ID NO: 12107 - RNA, 21 nt, RNAi-sense strand
ccagcucaggcuacugccauu

SEQ ID NO: 12108 - RNA, 21 nt, RNAi-antisense strand
uggcaguagccugagcugguu

SEQ ID NO: 12109 - DNA, 21 bp, Homo sapiens
aacggcctgagaggagcgtgt

SEQ ID NO: 12110 - RNA, 21 nt, RNAi-sense strand
cggccugagaggagcguguuu

SEQ ID NO: 12111 - RNA, 21 nt, RNAi-antisense strand
acacgcuccucucaggccguu

SEQ ID NO: 12112 - DNA, 21 bp, Homo sapiens
aacactctgcctggccttgag

SEQ ID NO: 12113 - RNA, 21 nt, RNAi-sense strand
cacucugccuggccuugaguu

SEQ ID NO: 12114 - RNA, 21 nt, RNAi-antisense strand
cucaaggccaggcagaguguu

SEQ ID NO: 12115 - DNA, 21 bp, Homo sapiens
aaattcaagaatgcagtatcc

SEQ ID NO: 12116 - RNA, 21 nt, RNAi-sense strand
auucaagaaugcaguauccuu

SEQ ID NO: 12117 - RNA, 21 nt, RNAi-antisense strand
ggauacugcauucuugaauuu

SEQ ID NO: 12118 - DNA, 21 bp, Homo sapiens
aattcaagaatgcagtatccg

SEQ ID NO: 12119 - RNA, 21 nt, RNAi-sense strand
uucaagaaugcaguauccguu

SEQ ID NO: 12120 - RNA, 21 nt, RNAi-antisense strand
cggauacugcauucuugaauu

SEQ ID NO: 12121 - DNA, 21 bp, Homo sapiens
aagaatgcagtatccgcgagc

SEQ ID NO: 12122 - RNA, 21 nt, RNAi-sense strand
gaaugcaguauccgcgagcuu

SEQ ID NO: 12123 - RNA, 21 nt, RNAi-antisense strand
gcucgcggauacugcauucuu

SEQ ID NO: 12124 - DNA, 21 bp, Homo sapiens
aatgcagtatccgcgagcctg

SEQ ID NO: 12125 - RNA, 21 nt, RNAi-sense strand
ugcaguauccgcgagccuguu

SEQ ID NO: 12126 - RNA, 21 nt, RNAi-antisense strand
caggcucgcggauacugcauu

SEQ ID NO: 12127 - DNA, 21 bp, Homo sapiens
aattagcaatactgagtgaag

SEQ ID NO: 12128 - RNA, 21 nt, RNAi-sense strand
uuagcaauacugagugaaguu

SEQ ID NO: 12129 - RNA, 21 nt, RNAi-antisense strand
cuucacucaguauugcuaauu

SEQ ID NO: 12130 - DNA, 21 bp, Homo sapiens
aatactgagtgaaggatgttg

SEQ ID NO: 12131 - RNA, 21 nt, RNAi-sense strand
uacugagugaaggauguuguu

SEQ ID NO: 12132 - RNA, 21 nt, RNAi-antisense strand
caacauccuucacucaguauu

SEQ ID NO: 12133 - DNA, 21 bp, Homo sapiens
aaagctgctttccatggcaca

SEQ ID NO: 12134 - RNA, 21 nt, RNAi-sense strand
agcugcuuuccauggcacauu

SEQ ID NO: 12135 - RNA, 21 nt, RNAi-antisense strand
ugugccauggaaagcagcuuu

SEQ ID NO: 12136 - DNA, 21 bp, Homo sapiens
aagctgctttccatggcacac

SEQ ID NO: 12137 - RNA, 21 nt, RNAi-sense strand
gcugcuuuccauggcacacuu

SEQ ID NO: 12138 - RNA, 21 nt, RNAi-antisense strand
gugugccauggaaagcagcuu

SEQ ID NO: 12139 - DNA, 21 bp, Homo sapiens
aaagtggatgccatagtttga

SEQ ID NO: 12140 - RNA, 21 nt, RNAi-sense strand
aguggaugccauaguuugauu

SEQ ID NO: 12141 - RNA, 21 nt, RNAi-antisense strand
ucaaacuauggcauccacuuu

SEQ ID NO: 12142 - DNA, 21 bp, Homo sapiens
aagtggatgccatagtttgaa

SEQ ID NO: 12143 - RNA, 21 nt, RNAi-sense strand
guggaugccauaguuugaauu

SEQ ID NO: 12144 - RNA, 21 nt, RNAi-antisense strand
uucaaacuauggcauccacuu

SEQ ID NO: 12145 - DNA, 21 bp, Homo sapiens
aattcatgcctcaagtcggtg

SEQ ID NO: 12146 - RNA, 21 nt, RNAi-sense strand
uucaugccucaagucgguguu

SEQ ID NO: 12147 - RNA, 21 nt, RNAi-antisense strand
caccgacuugaggcaugaauu

SEQ ID NO: 12148 - DNA, 21 bp, Homo sapiens
aactgccaggcagctgcagtt

SEQ ID NO: 12149 - RNA, 21 nt, RNAi-sense strand
cugccaggcagcugcaguuuu

SEQ ID NO: 12150 - RNA, 21 nt, RNAi-antisense strand
aacugcagcugccuggcaguu

SEQ ID NO: 12151 - DNA, 21 bp, Homo sapiens
aagacagcacagagagcggct

SEQ ID NO: 12152 - RNA, 21 nt, RNAi-sense strand
gacagcacagagagcggcuuu

SEQ ID NO: 12153 - RNA, 21 nt, RNAi-antisense strand
agccgcucucugugcugucuu

SEQ ID NO: 12154 - DNA, 21 bp, Homo sapiens
aatctctattcagcatcgtgt

SEQ ID NO: 12155 - RNA, 21 nt, RNAi-sense strand
ucucuauucagcaucguguuu

SEQ ID NO: 12156 - RNA, 21 nt, RNAi-antisense strand
acacgaugcugaauagagauu

SEQ ID NO: 12157 - DNA, 21 bp, Homo sapiens
catgagtaagagcaaatgctc

SEQ ID NO: 12158 - RNA, 21 nt, RNAi-sense strand
ugaguaagagcaaaugcucuu

SEQ ID NO: 12159 - RNA, 21 nt, RNAi-antisense strand
gagcauuugcucuuacucauu

SEQ ID NO: 12160 - DNA, 21 bp, Homo sapiens
catccttgtcaaggagcagaa

SEQ ID NO: 12161 - RNA, 21 nt, RNAi-sense strand
uccuugucaaggagcagaauu

SEQ ID NO: 12162 - RNA, 21 nt, RNAi-antisense strand
uucugcuccuugacaaggauu

SEQ ID NO: 12163 - DNA, 21 bp, Homo sapiens
caaggagcagaacggagtgca

SEQ ID NO: 12164 - RNA, 21 nt, RNAi-sense strand
aggagcagaacggagugcauu

SEQ ID NO: 12165 - RNA, 21 nt, RNAi-antisense strand
ugcacuccguucugcuccuuu

SEQ ID NO: 12166 - DNA, 21 bp, Homo sapiens
cagaacggagtgcagctcacc

SEQ ID NO: 12167 - RNA, 21 nt, RNAi-sense strand
gaacggagugcagcucaccuu

SEQ ID NO: 12168 - RNA, 21 nt, RNAi-antisense strand
ggugagcugcacuccguucuu

SEQ ID NO: 12169 - DNA, 21 bp, Homo sapiens
caagaagatcgactttctcct

SEQ ID NO: 12170 - RNA, 21 nt, RNAi-sense strand
agaagaucgacuuucuccuuu

SEQ ID NO: 12171 - RNA, 21 nt, RNAi-antisense strand
aggagaaagucgaucuucuuu

SEQ ID NO: 12172 - DNA, 21 bp, Homo sapiens
cattggctttgctgtggacct

SEQ ID NO: 12173 - RNA, 21 nt, RNAi-sense strand
uuggcuuugcuguggaccuuu

SEQ ID NO: 12174 - RNA, 21 nt, RNAi-antisense strand
agguccacagcaaagccaauu

SEQ ID NO: 12175 - DNA, 21 bp, Homo sapiens
cacggtcatcctcatctcact

SEQ ID NO: 12176 - RNA, 21 nt, RNAi-sense strand
cggucauccucaucucacuuu

SEQ ID NO: 12177 - RNA, 21 nt, RNAi-antisense strand
agugagaugaggaugaccguu

SEQ ID NO: 12178 - DNA, 21 bp, Homo sapiens
catcctcatctcactgtatgt

SEQ ID NO: 12179 - RNA, 21 nt, RNAi-sense strand
uccucaucucacuguauguuu

SEQ ID NO: 12180 - RNA, 21 nt, RNAi-antisense strand
acauacagugagaugaggauu

SEQ ID NO: 12181 - DNA, 21 bp, Homo sapiens
catctcactgtatgtcggctt

SEQ ID NO: 12182 - RNA, 21 nt, RNAi-sense strand
ucucacuguaugucggcuuuu

SEQ ID NO: 12183 - RNA, 21 nt, RNAi-antisense strand
aagccgacauacagugagauu

SEQ ID NO: 12184 - DNA, 21 bp, Homo sapiens
cactgtatgtcggcttcttct

SEQ ID NO: 12185 - RNA, 21 nt, RNAi-sense strand
cuguaugucggcuucuucuuu

SEQ ID NO: 12186 - RNA, 21 nt, RNAi-antisense strand
agaagaagccgacauacaguu

SEQ ID NO: 12187 - DNA, 21 bp, Homo sapiens
cactatctcttctcctccttc

SEQ ID NO: 12188 - RNA, 21 nt, RNAi-sense strand
cuaucucuucuccuccuucuu

SEQ ID NO: 12189 - RNA, 21 nt, RNAi-antisense strand
gaaggaggagaagagauaguu

SEQ ID NO: 12190 - DNA, 21 bp, Homo sapiens
cactgcaacaactcctggaac

SEQ ID NO: 12191 - RNA, 21 nt, RNAi-sense strand
cugcaacaacuccuggaacuu

SEQ ID NO: 12192 - RNA, 21 nt, RNAi-antisense strand
guuccaggaguuguugcaguu

SEQ ID NO: 12193 - DNA, 21 bp, Homo sapiens
catcctggtgactccagtgga

SEQ ID NO: 12194 - RNA, 21 nt, RNAi-sense strand
uccuggugacuccaguggauu

SEQ ID NO: 12195 - RNA, 21 nt, RNAi-antisense strand
uccacuggagucaccaggauu

SEQ ID NO: 12196 - DNA, 21 bp, Homo sapiens
cacacctgctgccgagtactt

SEQ ID NO: 12197 - RNA, 21 nt, RNAi-sense strand
caccugcugccgaguacuuuu

SEQ ID NO: 12198 - RNA, 21 nt, RNAi-antisense strand
aaguacucggcagcagguguu

SEQ ID NO: 12199 - DNA, 21 bp, Homo sapiens
cacctgctgccgagtactttg

SEQ ID NO: 12200 - RNA, 21 nt, RNAi-sense strand
ccugcugccgaguacuuuguu

SEQ ID NO: 12201 - RNA, 21 nt, RNAi-antisense strand
caaaguacucggcagcagguu

SEQ ID NO: 12202 - DNA, 21 bp, Homo sapiens
caccagagccatggcatcgac

SEQ ID NO: 12203 - RNA, 21 nt, RNAi-sense strand
ccagagccauggcaucgacuu

SEQ ID NO: 12204 - RNA, 21 nt, RNAi-antisense strand
gucgaugccauggcucugguu

SEQ ID NO: 12205 - DNA, 21 bp, Homo sapiens
cagagccatggcatcgacgac

SEQ ID NO: 12206 - RNA, 21 nt, RNAi-sense strand
gagccauggcaucgacgacuu

SEQ ID NO: 12207 - RNA, 21 nt, RNAi-antisense strand
gucgucgaugccauggcucuu

SEQ ID NO: 12208 - DNA, 21 bp, Homo sapiens
catcgtgctgctctacttcag

SEQ ID NO: 12209 - RNA, 21 nt, RNAi-sense strand
ucgugcugcucuacuucaguu

SEQ ID NO: 12210 - RNA, 21 nt, RNAi-antisense strand
cugaaguagagcagcacgauu

SEQ ID NO: 12211 - DNA, 21 bp, Homo sapiens
cacagccaccatgccatacgt

SEQ ID NO: 12212 - RNA, 21 nt, RNAi-sense strand
cagccaccaugccauacguuu

SEQ ID NO: 12213 - RNA, 21 nt, RNAi-antisense strand
acguauggcaugguggcuguu

SEQ ID NO: 12214 - DNA, 21 bp, Homo sapiens
cagccaccatgccatacgtgg

SEQ ID NO: 12215 - RNA, 21 nt, RNAi-sense strand
gccaccaugccauacgugguu

SEQ ID NO: 12216 - RNA, 21 nt, RNAi-antisense strand
ccacguauggcaugguggcuu

SEQ ID NO: 12217 - DNA, 21 bp, Homo sapiens
caccatgccatacgtggtcct

SEQ ID NO: 12218 - RNA, 21 nt, RNAi-sense strand
ccaugccauacgugguccuuu

SEQ ID NO: 12219 - RNA, 21 nt, RNAi-antisense strand
aggaccacguauggcaugguu

SEQ ID NO: 12220 - DNA, 21 bp, Homo sapiens
catgccatacgtggtcctcac

SEQ ID NO: 12221 - RNA, 21 nt, RNAi-sense strand
ugccauacgugguccucacuu

SEQ ID NO: 12222 - RNA, 21 nt, RNAi-antisense strand
gugaggaccacguauggcauu

SEQ ID NO: 12223 - DNA, 21 bp, Homo sapiens
catagacggcatcagagcata

SEQ ID NO: 12224 - RNA, 21 nt, RNAi-sense strand
uagacggcaucagagcauauu

SEQ ID NO: 12225 - RNA, 21 nt, RNAi-antisense strand
uaugcucugaugccgucuauu

SEQ ID NO: 12226 - DNA, 21 bp, Homo sapiens
catcagagcatacctgagcgt

SEQ ID NO: 12227 - RNA, 21 nt, RNAi-sense strand
ucagagcauaccugagcguuu

SEQ ID NO: 12228 - RNA, 21 nt, RNAi-antisense strand
acgcucagguaugcucugauu

SEQ ID NO: 12229 - DNA, 21 bp, Homo sapiens
cagagcatacctgagcgttga

SEQ ID NO: 12230 - RNA, 21 nt, RNAi-sense strand
gagcauaccugagcguugauu

SEQ ID NO: 12231 - RNA, 21 nt, RNAi-antisense strand
ucaacgcucagguaugcucuu

SEQ ID NO: 12232 - DNA, 21 bp, Homo sapiens
catacctgagcgttgacttct

SEQ ID NO: 12233 - RNA, 21 nt, RNAi-sense strand
uaccugagcguugacuucuuu

SEQ ID NO: 12234 - RNA, 21 nt, RNAi-antisense strand
agaagucaacgcucagguauu

SEQ ID NO: 12235 - DNA, 21 bp, Homo sapiens
cagctacaacaagttcaccaa

SEQ ID NO: 12236 - RNA, 21 nt, RNAi-sense strand
gcuacaacaaguucaccaauu

SEQ ID NO: 12237 - RNA, 21 nt, RNAi-antisense strand
uuggugaacuuguuguagcuu

SEQ ID NO: 12238 - DNA, 21 bp, Homo sapiens
caacaagttcaccaacaactg

SEQ ID NO: 12239 - RNA, 21 nt, RNAi-sense strand
acaaguucaccaacaacuguu

SEQ ID NO: 12240 - RNA, 21 nt, RNAi-antisense strand
caguuguuggugaacuuguuu

SEQ ID NO: 12241 - DNA, 21 bp, Homo sapiens
caagttcaccaacaactgcta

SEQ ID NO: 12242 - RNA, 21 nt, RNAi-sense strand
aguucaccaacaacugcuauu

SEQ ID NO: 12243 - RNA, 21 nt, RNAi-antisense strand
uagcaguuguuggugaacuuu

SEQ ID NO: 12244 - DNA, 21 bp, Homo sapiens
catggcacagaagcacagtgt

SEQ ID NO: 12245 - RNA, 21 nt, RNAi-sense strand
uggcacagaagcacaguguuu

SEQ ID NO: 12246 - RNA, 21 nt, RNAi-antisense strand
acacugugcuucugugccauu

SEQ ID NO: 12247 - DNA, 21 bp, Homo sapiens
catcgatgagttccagctgct

SEQ ID NO: 12248 - RNA, 21 nt, RNAi-sense strand
ucgaugaguuccagcugcuuu

SEQ ID NO: 12249 - RNA, 21 nt, RNAi-antisense strand
agcagcuggaacucaucgauu

SEQ ID NO: 12250 - DNA, 21 bp, Homo sapiens
cagctgctgcacagacaccgt

SEQ ID NO: 12251 - RNA, 21 nt, RNAi-sense strand
gcugcugcacagacaccguuu

SEQ ID NO: 12252 - RNA, 21 nt, RNAi-antisense strand
acggugucugugcagcagcuu

SEQ ID NO: 12253 - DNA, 21 bp, Homo sapiens
cacagacaccgtgagctcttc

SEQ ID NO: 12254 - RNA, 21 nt, RNAi-sense strand
cagacaccgugagcucuucuu

SEQ ID NO: 12255 - RNA, 21 nt, RNAi-antisense strand
gaagagcucacggugucuguu

SEQ ID NO: 12256 - DNA, 21 bp, Homo sapiens
cagacaccgtgagctcttcac

SEQ ID NO: 12257 - RNA, 21 nt, RNAi-sense strand
gacaccgugagcucuucacuu

SEQ ID NO: 12258 - RNA, 21 nt, RNAi-antisense strand
gugaagagcucacggugucuu

SEQ ID NO: 12259 - DNA, 21 bp, Homo sapiens
caccgtgagctcttcacgctc

SEQ ID NO: 12260 - RNA, 21 nt, RNAi-sense strand
ccgugagcucuucacgcucuu

SEQ ID NO: 12261 - RNA, 21 nt, RNAi-antisense strand
gagcgugaagagcucacgguu

SEQ ID NO: 12262 - DNA, 21 bp, Homo sapiens
cacgctcttcatcgtcctggc

SEQ ID NO: 12263 - RNA, 21 nt, RNAi-sense strand
cgcucuucaucguccuggcuu

SEQ ID NO: 12264 - RNA, 21 nt, RNAi-antisense strand
gccaggacgaugaagagcguu

SEQ ID NO: 12265 - DNA, 21 bp, Homo sapiens
catcgtcctggcgaccttcct

SEQ ID NO: 12266 - RNA, 21 nt, RNAi-sense strand
ucguccuggcgaccuuccuuu

SEQ ID NO: 12267 - RNA, 21 nt, RNAi-antisense strand
aggaaggucgccaggacgauu

SEQ ID NO: 12268 - DNA, 21 bp, Homo sapiens
caccaacggtggcatctacgt

SEQ ID NO: 12269 - RNA, 21 nt, RNAi-sense strand
ccaacgguggcaucuacguuu

SEQ ID NO: 12270 - RNA, 21 nt, RNAi-antisense strand
acguagaugccaccguugguu

SEQ ID NO: 12271 - DNA, 21 bp, Homo sapiens
caacggtggcatctacgtctt

SEQ ID NO: 12272 - RNA, 21 nt, RNAi-sense strand
acgguggcaucuacgucuuuu

SEQ ID NO: 12273 - RNA, 21 nt, RNAi-antisense strand
aagacguagaugccaccguuu

SEQ ID NO: 12274 - DNA, 21 bp, Homo sapiens
catctacgtcttcacgctcct

SEQ ID NO: 12275 - RNA, 21 nt, RNAi-sense strand
ucuacgucuucacgcuccuuu

SEQ ID NO: 12276 - RNA, 21 nt, RNAi-antisense strand
aggagcgugaagacguagauu

SEQ ID NO: 12277 - DNA, 21 bp, Homo sapiens
cacgtccatcctctttggagt

SEQ ID NO: 12278 - RNA, 21 nt, RNAi-sense strand
cguccauccucuuuggaguuu

SEQ ID NO: 12279 - RNA, 21 nt, RNAi-antisense strand
acuccaaagaggauggacguu

SEQ ID NO: 12280 - DNA, 21 bp, Homo sapiens
catcctctttggagtgctcat

SEQ ID NO: 12281 - RNA, 21 nt, RNAi-sense strand
uccucuuuggagugcucauuu

SEQ ID NO: 12282 - RNA, 21 nt, RNAi-antisense strand
augagcacuccaaagaggauu

SEQ ID NO: 12283 - DNA, 21 bp, Homo sapiens
catcgaagccatcggagtggc

SEQ ID NO: 12284 - RNA, 21 nt, RNAi-sense strand
ucgaagccaucggaguggcuu

SEQ ID NO: 12285 - RNA, 21 nt, RNAi-antisense strand
gccacuccgauggcuucgauu

SEQ ID NO: 12286 - DNA, 21 bp, Homo sapiens
catcggagtggcctggttcta

SEQ ID NO: 12287 - RNA, 21 nt, RNAi-sense strand
ucggaguggccugguucuauu

SEQ ID NO: 12288 - RNA, 21 nt, RNAi-antisense strand
uagaaccaggccacuccgauu

SEQ ID NO: 12289 - DNA, 21 bp, Homo sapiens
cagttcagcgacgacatccag

SEQ ID NO: 12290 - RNA, 21 nt, RNAi-sense strand
guucagcgacgacauccaguu

SEQ ID NO: 12291 - RNA, 21 nt, RNAi-antisense strand
cuggaugucgucgcugaacuu

SEQ ID NO: 12292 - DNA, 21 bp, Homo sapiens
cagcgacgacatccagcagat

SEQ ID NO: 12293 - RNA, 21 nt, RNAi-sense strand
gcgacgacauccagcagauuu

SEQ ID NO: 12294 - RNA, 21 nt, RNAi-antisense strand
aucugcuggaugucgucgcuu

SEQ ID NO: 12295 - DNA, 21 bp, Homo sapiens
cagcattgtgaccttcagacc

SEQ ID NO: 12296 - RNA, 21 nt, RNAi-sense strand
gcauugugaccuucagaccuu

SEQ ID NO: 12297 - RNA, 21 nt, RNAi-antisense strand
ggucugaaggucacaaugcuu

SEQ ID NO: 12298 - DNA, 21 bp, Homo sapiens
cactacggagcctacatcttc

SEQ ID NO: 12299 - RNA, 21 nt, RNAi-sense strand
cuacggagccuacaucuucuu

SEQ ID NO: 12300 - RNA, 21 nt, RNAi-antisense strand
gaagauguaggcuccguaguu

SEQ ID NO: 12301 - DNA, 21 bp, Homo sapiens
catcgccacatcctccatggc

SEQ ID NO: 12302 - RNA, 21 nt, RNAi-sense strand
ucgccacauccuccauggcuu

SEQ ID NO: 12303 - RNA, 21 nt, RNAi-antisense strand
gccauggaggauguggcgauu

SEQ ID NO: 12304 - DNA, 21 bp, Homo sapiens
cacatcctccatggccatggt

SEQ ID NO: 12305 - RNA, 21 nt, RNAi-sense strand
cauccuccauggccaugguuu

SEQ ID NO: 12306 - RNA, 21 nt, RNAi-antisense strand
accauggccauggaggauguu

SEQ ID NO: 12307 - DNA, 21 bp, Homo sapiens
catcctccatggccatggtgc

SEQ ID NO: 12308 - RNA, 21 nt, RNAi-sense strand
uccuccauggccauggugcuu

SEQ ID NO: 12309 - RNA, 21 nt, RNAi-antisense strand
gcaccauggccauggaggauu

SEQ ID NO: 12310 - DNA, 21 bp, Homo sapiens
catctatgcggcctacaagtt

SEQ ID NO: 12311 - RNA, 21 nt, RNAi-sense strand
ucuaugcggccuacaaguuuu

SEQ ID NO: 12312 - RNA, 21 nt, RNAi-antisense strand
aacuuguaggccgcauagauu

SEQ ID NO: 12313 - DNA, 21 bp, Homo sapiens
caagttctgcagcctgcctgg

SEQ ID NO: 12314 - RNA, 21 nt, RNAi-sense strand
aguucugcagccugccugguu

SEQ ID NO: 12315 - RNA, 21 nt, RNAi-antisense strand
ccaggcaggcugcagaacuuu

SEQ ID NO: 12316 - DNA, 21 bp, Homo sapiens
cactggctcaaggtgtagagg

SEQ ID NO: 12317 - RNA, 21 nt, RNAi-sense strand
cuggcucaagguguagagguu

SEQ ID NO: 12318 - RNA, 21 nt, RNAi-antisense strand
ccucuacaccuugagccaguu

SEQ ID NO: 12319 - DNA, 21 bp, Homo sapiens
caggaagtcatcctgcaatgg

SEQ ID NO: 12320 - RNA, 21 nt, RNAi-sense strand
ggaagucauccugcaaugguu

SEQ ID NO: 12321 - RNA, 21 nt, RNAi-antisense strand
ccauugcaggaugacuuccuu

SEQ ID NO: 12322 - DNA, 21 bp, Homo sapiens
cacgaacaaaccaaggaaatc

SEQ ID NO: 12323 - RNA, 21 nt, RNAi-sense strand
cgaacaaaccaaggaaaucuu

SEQ ID NO: 12324 - RNA, 21 nt, RNAi-antisense strand
gauuuccuugguuuguucguu

SEQ ID NO: 12325 - DNA, 21 bp, Homo sapiens
caaaccaaggaaatctaagtt

SEQ ID NO: 12326 - RNA, 21 nt, RNAi-sense strand
aaccaaggaaaucuaaguuuu

SEQ ID NO: 12327 - RNA, 21 nt, RNAi-antisense strand
aacuuagauuuccuugguuuu

SEQ ID NO: 12328 - DNA, 21 bp, Homo sapiens
caaggaaatctaagtttcgag

SEQ ID NO: 12329 - RNA, 21 nt, RNAi-sense strand
aggaaaucuaaguuucgaguu

SEQ ID NO: 12330 - RNA, 21 nt, RNAi-antisense strand
cucgaaacuuagauuuccuuu

SEQ ID NO: 12331 - DNA, 21 bp, Homo sapiens
caacttctactcttcaacctc

SEQ ID NO: 12332 - RNA, 21 nt, RNAi-sense strand
acuucuacucuucaaccucuu

SEQ ID NO: 12333 - RNA, 21 nt, RNAi-antisense strand
gagguugaagaguagaaguuu

SEQ ID NO: 12334 - DNA, 21 bp, Homo sapiens
cacaaacaacaaagcagaaga

SEQ ID NO: 12335 - RNA, 21 nt, RNAi-sense strand
caaacaacaaagcagaagauu

SEQ ID NO: 12336 - RNA, 21 nt, RNAi-antisense strand
ucuucugcuuuguuguuuguu

SEQ ID NO: 12337 - DNA, 21 bp, Homo sapiens
caaacaacaaagcagaagact

SEQ ID NO: 12338 - RNA, 21 nt, RNAi-sense strand
aacaacaaagcagaagacuuu

SEQ ID NO: 12339 - RNA, 21 nt, RNAi-antisense strand
agucuucugcuuuguuguuuu

SEQ ID NO: 12340 - DNA, 21 bp, Homo sapiens
caacaaagcagaagactcctc

SEQ ID NO: 12341 - RNA, 21 nt, RNAi-sense strand
acaaagcagaagacuccucuu

SEQ ID NO: 12342 - RNA, 21 nt, RNAi-antisense strand
gaggagucuucugcuuuguuu

SEQ ID NO: 12343 - DNA, 21 bp, Homo sapiens
caaagcagaagactcctctct

SEQ ID NO: 12344 - RNA, 21 nt, RNAi-sense strand
aagcagaagacuccucucuuu

SEQ ID NO: 12345 - RNA, 21 nt, RNAi-antisense strand
agagaggagucuucugcuuuu

SEQ ID NO: 12346 - DNA, 21 bp, Homo sapiens
cagaagactcctctcttctga

SEQ ID NO: 12347 - RNA, 21 nt, RNAi-sense strand
gaagacuccucucuucugauu

SEQ ID NO: 12348 - RNA, 21 nt, RNAi-antisense strand
ucagaagagaggagucuucuu

SEQ ID NO: 12349 - DNA, 21 bp, Homo sapiens
cacctcgccgtgtcttgtgtt

SEQ ID NO: 12350 - RNA, 21 nt, RNAi-sense strand
ccucgccgugucuuguguuuu

SEQ ID NO: 12351 - RNA, 21 nt, RNAi-antisense strand
aacacaagacacggcgagguu

SEQ ID NO: 12352 - DNA, 21 bp, Homo sapiens
catgctgtctgtgtgaggctc

SEQ ID NO: 12353 - RNA, 21 nt, RNAi-sense strand
ugcugucugugugaggcucuu

SEQ ID NO: 12354 - RNA, 21 nt, RNAi-antisense strand
gagccucacacagacagcauu

SEQ ID NO: 12355 - DNA, 21 bp, Homo sapiens
cacgatccttgtagacgcacc

SEQ ID NO: 12356 - RNA, 21 nt, RNAi-sense strand
cgauccuuguagacgcaccuu

SEQ ID NO: 12357 - RNA, 21 nt, RNAi-antisense strand
ggugcgucuacaaggaucguu

SEQ ID NO: 12358 - DNA, 21 bp, Homo sapiens
cacagtagcttcctagaccat

SEQ ID NO: 12359 - RNA, 21 nt, RNAi-sense strand
caguagcuuccuagaccauuu

SEQ ID NO: 12360 - RNA, 21 nt, RNAi-antisense strand
auggucuaggaagcuacuguu

SEQ ID NO: 12361 - DNA, 21 bp, Homo sapiens
cagtagcttcctagaccattt

SEQ ID NO: 12362 - RNA, 21 nt, RNAi-sense strand
guagcuuccuagaccauuuuu

SEQ ID NO: 12363 - RNA, 21 nt, RNAi-antisense strand
aaauggucuaggaagcuacuu

SEQ ID NO: 12364 - DNA, 21 bp, Homo sapiens
caagtgtcctgcttggtttag

SEQ ID NO: 12365 - RNA, 21 nt, RNAi-sense strand
aguguccugcuugguuuaguu

SEQ ID NO: 12366 - RNA, 21 nt, RNAi-antisense strand
cuaaaccaagcaggacacuuu

SEQ ID NO: 12367 - DNA, 21 bp, Homo sapiens
cagaaggtgaaatggaggaaa

SEQ ID NO: 12368 - RNA, 21 nt, RNAi-sense strand
gaaggugaaauggaggaaauu

SEQ ID NO: 12369 - RNA, 21 nt, RNAi-antisense strand
uuuccuccauuucaccuucuu

SEQ ID NO: 12370 - DNA, 21 bp, Homo sapiens
cacaaattcatgcaaagtcct

SEQ ID NO: 12371 - RNA, 21 nt, RNAi-sense strand
caaauucaugcaaaguccuuu

SEQ ID NO: 12372 - RNA, 21 nt, RNAi-antisense strand
aggacuuugcaugaauuuguu

SEQ ID NO: 12373 - DNA, 21 bp, Homo sapiens
caaattcatgcaaagtccttt

SEQ ID NO: 12374 - RNA, 21 nt, RNAi-sense strand
aauucaugcaaaguccuuuuu

SEQ ID NO: 12375 - RNA, 21 nt, RNAi-antisense strand
aaaggacuuugcaugaauuuu

SEQ ID NO: 12376 - DNA, 21 bp, Homo sapiens
cagcagaggccgtaaattgag

SEQ ID NO: 12377 - RNA, 21 nt, RNAi-sense strand
gcagaggccguaaauugaguu

SEQ ID NO: 12378 - RNA, 21 nt, RNAi-antisense strand
cucaauuuacggccucugcuu

SEQ ID NO: 12379 - DNA, 21 bp, Homo sapiens
cagaggccgtaaattgagcgt

SEQ ID NO: 12380 - RNA, 21 nt, RNAi-sense strand
gaggccguaaauugagcguuu

SEQ ID NO: 12381 - RNA, 21 nt, RNAi-antisense strand
acgcucaauuuacggccucuu

SEQ ID NO: 12382 - DNA, 21 bp, Homo sapiens
cagttgacacattgcacacac

SEQ ID NO: 12383 - RNA, 21 nt, RNAi-sense strand
guugacacauugcacacacuu

SEQ ID NO: 12384 - RNA, 21 nt, RNAi-antisense strand
gugugugcaaugugucaacuu

SEQ ID NO: 12385 - DNA, 21 bp, Homo sapiens
cacattgcacacacagtctgt

SEQ ID NO: 12386 - RNA, 21 nt, RNAi-sense strand
cauugcacacacagucuguuu

SEQ ID NO: 12387 - RNA, 21 nt, RNAi-antisense strand
acagacugugugugcaauguu

SEQ ID NO: 12388 - DNA, 21 bp, Homo sapiens
cattgcacacacagtctgttc

SEQ ID NO: 12389 - RNA, 21 nt, RNAi-sense strand
uugcacacacagucuguucuu

SEQ ID NO: 12390 - RNA, 21 nt, RNAi-antisense strand
gaacagacugugugugcaauu

SEQ ID NO: 12391 - DNA, 21 bp, Homo sapiens
cacacacagtctgttcagagg

SEQ ID NO: 12392 - RNA, 21 nt, RNAi-sense strand
cacacagucuguucagagguu

SEQ ID NO: 12393 - RNA, 21 nt, RNAi-antisense strand
ccucugaacagacuguguguu

SEQ ID NO: 12394 - DNA, 21 bp, Homo sapiens
cacacagtctgttcagaggca

SEQ ID NO: 12395 - RNA, 21 nt, RNAi-sense strand
cacagucuguucagaggcauu

SEQ ID NO: 12396 - RNA, 21 nt, RNAi-antisense strand
ugccucugaacagacuguguu

SEQ ID NO: 12397 - DNA, 21 bp, Homo sapiens
cacagtctgttcagaggcatt

SEQ ID NO: 12398 - RNA, 21 nt, RNAi-sense strand
cagucuguucagaggcauuuu

SEQ ID NO: 12399 - RNA, 21 nt, RNAi-antisense strand
aaugccucugaacagacuguu

SEQ ID NO: 12400 - DNA, 21 bp, Homo sapiens
cagtctgttcagaggcattgg

SEQ ID NO: 12401 - RNA, 21 nt, RNAi-sense strand
gucuguucagaggcauugguu

SEQ ID NO: 12402 - RNA, 21 nt, RNAi-antisense strand
ccaaugccucugaacagacuu

SEQ ID NO: 12403 - DNA, 21 bp, Homo sapiens
caccaggaaattctgtttatg

SEQ ID NO: 12404 - RNA, 21 nt, RNAi-sense strand
ccaggaaauucuguuuauguu

SEQ ID NO: 12405 - RNA, 21 nt, RNAi-antisense strand
cauaaacagaauuuccugguu

SEQ ID NO: 12406 - DNA, 21 bp, Homo sapiens
caggaaattctgtttatgttc

SEQ ID NO: 12407 - RNA, 21 nt, RNAi-sense strand
ggaaauucuguuuauguucuu

SEQ ID NO: 12408 - RNA, 21 nt, RNAi-antisense strand
gaacauaaacagaauuuccuu

SEQ ID NO: 12409 - DNA, 21 bp, Homo sapiens
cagctcaggctactgccactc

SEQ ID NO: 12410 - RNA, 21 nt, RNAi-sense strand
gcucaggcuacugccacucuu

SEQ ID NO: 12411 - RNA, 21 nt, RNAi-antisense strand
gaguggcaguagccugagcuu

SEQ ID NO: 12412 - DNA, 21 bp, Homo sapiens
caggctactgccactcaggca

SEQ ID NO: 12413 - RNA, 21 nt, RNAi-sense strand
ggcuacugccacucaggcauu

SEQ ID NO: 12414 - RNA, 21 nt, RNAi-antisense strand
ugccugaguggcaguagccuu

SEQ ID NO: 12415 - DNA, 21 bp, Homo sapiens
caggcagcctgcagaccaaca

SEQ ID NO: 12416 - RNA, 21 nt, RNAi-sense strand
ggcagccugcagaccaacauu

SEQ ID NO: 12417 - RNA, 21 nt, RNAi-antisense strand
uguuggucugcaggcugccuu

SEQ ID NO: 12418 - DNA, 21 bp, Homo sapiens
cagcctgcagaccaacactct

SEQ ID NO: 12419 - RNA, 21 nt, RNAi-sense strand
gccugcagaccaacacucuuu

SEQ ID NO: 12420 - RNA, 21 nt, RNAi-antisense strand
agaguguuggucugcaggcuu

SEQ ID NO: 12421 - DNA, 21 bp, Homo sapiens
cagaccaacactctgcctggc

SEQ ID NO: 12422 - RNA, 21 nt, RNAi-sense strand
gaccaacacucugccuggcuu

SEQ ID NO: 12423 - RNA, 21 nt, RNAi-antisense strand
gccaggcagaguguuggucuu

SEQ ID NO: 12424 - DNA, 21 bp, Homo sapiens
caacactctgcctggccttga

SEQ ID NO: 12425 - RNA, 21 nt, RNAi-sense strand
acacucugccuggccuugauu

SEQ ID NO: 12426 - RNA, 21 nt, RNAi-antisense strand
ucaaggccaggcagaguguuu

SEQ ID NO: 12427 - DNA, 21 bp, Homo sapiens
caggtgcgtgccacatcaata

SEQ ID NO: 12428 - RNA, 21 nt, RNAi-sense strand
ggugcgugccacaucaauauu

SEQ ID NO: 12429 - RNA, 21 nt, RNAi-antisense strand
uauugauguggcacgcaccuu

SEQ ID NO: 12430 - DNA, 21 bp, Homo sapiens
caaattcaagaatgcagtatc

SEQ ID NO: 12431 - RNA, 21 nt, RNAi-sense strand
aauucaagaaugcaguaucuu

SEQ ID NO: 12432 - RNA, 21 nt, RNAi-antisense strand
gauacugcauucuugaauuuu

SEQ ID NO: 12433 - DNA, 21 bp, Homo sapiens
caagaatgcagtatccgcgag

SEQ ID NO: 12434 - RNA, 21 nt, RNAi-sense strand
agaaugcaguauccgcgaguu

SEQ ID NO: 12435 - RNA, 21 nt, RNAi-antisense strand
cucgcggauacugcauucuuu

SEQ ID NO: 12436 - DNA, 21 bp, Homo sapiens
cagtatccgcgagcctgcttg

SEQ ID NO: 12437 - RNA, 21 nt, RNAi-sense strand
guauccgcgagccugcuuguu

SEQ ID NO: 12438 - RNA, 21 nt, RNAi-antisense strand
caagcaggcucgcggauacuu

SEQ ID NO: 12439 - DNA, 21 bp, Homo sapiens
caatactgagtgaaggatgtt

SEQ ID NO: 12440 - RNA, 21 nt, RNAi-sense strand
auacugagugaaggauguuuu

SEQ ID NO: 12441 - RNA, 21 nt, RNAi-antisense strand
aacauccuucacucaguauuu

SEQ ID NO: 12442 - DNA, 21 bp, Homo sapiens
cactgacaggaaagtggatgc

SEQ ID NO: 12443 - RNA, 21 nt, RNAi-sense strand
cugacaggaaaguggaugcuu

SEQ ID NO: 12444 - RNA, 21 nt, RNAi-antisense strand
gcauccacuuuccugucaguu

SEQ ID NO: 12445 - DNA, 21 bp, Homo sapiens
caggaaagtggatgccatagt

SEQ ID NO: 12446 - RNA, 21 nt, RNAi-sense strand
ggaaaguggaugccauaguuu

SEQ ID NO: 12447 - RNA, 21 nt, RNAi-antisense strand
acuauggcauccacuuuccuu

SEQ ID NO: 12448 - DNA, 21 bp, Homo sapiens
catagtttgaattcatgcctc

SEQ ID NO: 12449 - RNA, 21 nt, RNAi-sense strand
uaguuugaauucaugccucuu

SEQ ID NO: 12450 - RNA, 21 nt, RNAi-antisense strand
gaggcaugaauucaaacuauu

SEQ ID NO: 12451 - DNA, 21 bp, Homo sapiens
cagcctgtgaactgccaggca

SEQ ID NO: 12452 - RNA, 21 nt, RNAi-sense strand
gccugugaacugccaggcauu

SEQ ID NO: 12453 - RNA, 21 nt, RNAi-antisense strand
ugccuggcaguucacaggcuu

SEQ ID NO: 12454 - DNA, 21 bp, Homo sapiens
caggcagctgcagttagcaca

SEQ ID NO: 12455 - RNA, 21 nt, RNAi-sense strand
ggcagcugcaguuagcacauu

SEQ ID NO: 12456 - RNA, 21 nt, RNAi-antisense strand
ugugcuaacugcagcugccuu

SEQ ID NO: 12457 - DNA, 21 bp, Homo sapiens
cagctgcagttagcacagagg

SEQ ID NO: 12458 - RNA, 21 nt, RNAi-sense strand
gcugcaguuagcacagagguu

SEQ ID NO: 12459 - RNA, 21 nt, RNAi-antisense strand
ccucugugcuaacugcagcuu

SEQ ID NO: 12460 - DNA, 21 bp, Homo sapiens
cagttagcacagaggatggct

SEQ ID NO: 12461 - RNA, 21 nt, RNAi-sense strand
guuagcacagaggauggcuuu

SEQ ID NO: 12462 - RNA, 21 nt, RNAi-antisense strand
agccauccucugugcuaacuu

SEQ ID NO: 12463 - DNA, 21 bp, Homo sapiens
cagtcagcacagagagcggct

SEQ ID NO: 12464 - RNA, 21 nt, RNAi-sense strand
gucagcacagagagcggcuuu

SEQ ID NO: 12465 - RNA, 21 nt, RNAi-antisense strand
agccgcucucugugcugacuu

SEQ ID NO: 12466 - DNA, 21 bp, Homo sapiens
catcgccttctggttgttgaa

SEQ ID NO: 12467 - RNA, 21 nt, RNAi-sense strand
ucgccuucugguuguugaauu

SEQ ID NO: 12468 - RNA, 21 nt, RNAi-antisense strand
uucaacaaccagaaggcgauu

SEQ ID NO: 12469 - DNA, 21 bp, Homo sapiens
caggtgttgtccgtgtctgtt

SEQ ID NO: 12470 - RNA, 21 nt, RNAi-sense strand
gguguuguccgugucuguuuu

SEQ ID NO: 12471 - RNA, 21 nt, RNAi-antisense strand
aacagacacggacaacaccuu

SEQ ID NO: 12472 - DNA, 21 bp, Homo sapiens
caatctctattcagcatcgtg

SEQ ID NO: 12473 - RNA, 21 nt, RNAi-sense strand
aucucuauucagcaucguguu

SEQ ID NO: 12474 - RNA, 21 nt, RNAi-antisense strand
cacgaugcugaauagagauuu

SEQ ID NO: 12475 - DNA, 21 bp, Homo sapiens
gaagaagcacagaattcctca

SEQ ID NO: 12476 - RNA, 21 nt, RNAi-sense strand
agaagcacagaauuccucauu

SEQ ID NO: 12477 - RNA, 21 nt, RNAi-antisense strand
ugaggaauucugugcuucuuu

SEQ ID NO: 12478 - DNA, 21 bp, Homo sapiens
gaagcacagaattcctcaact

SEQ ID NO: 12479 - RNA, 21 nt, RNAi-sense strand
agcacagaauuccucaacuuu

SEQ ID NO: 12480 - RNA, 21 nt, RNAi-antisense strand
aguugaggaauucugugcuuu

SEQ ID NO: 12481 - DNA, 21 bp, Homo sapiens
gagtaagagcaaatgctccgt

SEQ ID NO: 12482 - RNA, 21 nt, RNAi-sense strand
guaagagcaaaugcuccguuu

SEQ ID NO: 12483 - RNA, 21 nt, RNAi-antisense strand
acggagcauuugcucuuacuu

SEQ ID NO: 12484 - DNA, 21 bp, Homo sapiens
gactcatgtcttccgtggtgg

SEQ ID NO: 12485 - RNA, 21 nt, RNAi-sense strand
cucaugucuuccguggugguu

SEQ ID NO: 12486 - RNA, 21 nt, RNAi-antisense strand
ccaccacggaagacaugaguu

SEQ ID NO: 12487 - DNA, 21 bp, Homo sapiens
gaaggaggtggagctcatcct

SEQ ID NO: 12488 - RNA, 21 nt, RNAi-sense strand
aggagguggagcucauccuuu

SEQ ID NO: 12489 - RNA, 21 nt, RNAi-antisense strand
aggaugagcuccaccuccuuu

SEQ ID NO: 12490 - DNA, 21 bp, Homo sapiens
gaggtggagctcatccttgtc

SEQ ID NO: 12491 - RNA, 21 nt, RNAi-sense strand
gguggagcucauccuugucuu

SEQ ID NO: 12492 - RNA, 21 nt, RNAi-antisense strand
gacaaggaugagcuccaccuu

SEQ ID NO: 12493 - DNA, 21 bp, Homo sapiens
gagctcatccttgtcaaggag

SEQ ID NO: 12494 - RNA, 21 nt, RNAi-sense strand
gcucauccuugucaaggaguu

SEQ ID NO: 12495 - RNA, 21 nt, RNAi-antisense strand
cuccuugacaaggaugagcuu

SEQ ID NO: 12496 - DNA, 21 bp, Homo sapiens
gagcagaacggagtgcagctc

SEQ ID NO: 12497 - RNA, 21 nt, RNAi-sense strand
gcagaacggagugcagcucuu

SEQ ID NO: 12498 - RNA, 21 nt, RNAi-antisense strand
gagcugcacuccguucugcuu

SEQ ID NO: 12499 - DNA, 21 bp, Homo sapiens
gaacggagtgcagctcaccag

SEQ ID NO: 12500 - RNA, 21 nt, RNAi-sense strand
acggagugcagcucaccaguu

SEQ ID NO: 12501 - RNA, 21 nt, RNAi-antisense strand
cuggugagcugcacuccguuu

SEQ ID NO: 12502 - DNA, 21 bp, Homo sapiens
gagtgcagctcaccagctcca

SEQ ID NO: 12503 - RNA, 21 nt, RNAi-sense strand
gugcagcucaccagcuccauu

SEQ ID NO: 12504 - RNA, 21 nt, RNAi-antisense strand
uggagcuggugagcugcacuu

SEQ ID NO: 12505 - DNA, 21 bp, Homo sapiens
gaagatcgactttctcctgtc

SEQ ID NO: 12506 - RNA, 21 nt, RNAi-sense strand
agaucgacuuucuccugucuu

SEQ ID NO: 12507 - RNA, 21 nt, RNAi-antisense strand
gacaggagaaagucgaucuuu

SEQ ID NO: 12508 - DNA, 21 bp, Homo sapiens
gatcgactttctcctgtccgt

SEQ ID NO: 12509 - RNA, 21 nt, RNAi-sense strand
ucgacuuucuccuguccguuu

SEQ ID NO: 12510 - RNA, 21 nt, RNAi-antisense strand
acggacaggagaaagucgauu

SEQ ID NO: 12511 - DNA, 21 bp, Homo sapiens
gactttctcctgtccgtcatt

SEQ ID NO: 12512 - RNA, 21 nt, RNAi-sense strand
cuuucuccuguccgucauuuu

SEQ ID NO: 12513 - RNA, 21 nt, RNAi-antisense strand
aaugacggacaggagaaaguu

SEQ ID NO: 12514 - DNA, 21 bp, Homo sapiens
gatccactgcaacaactcctg

SEQ ID NO: 12515 - RNA, 21 nt, RNAi-sense strand
uccacugcaacaacuccuguu

SEQ ID NO: 12516 - RNA, 21 nt, RNAi-antisense strand
caggaguuguugcaguggauu

SEQ ID NO: 12517 - DNA, 21 bp, Homo sapiens
gactccagtggagacagctcg

SEQ ID NO: 12518 - RNA, 21 nt, RNAi-sense strand
cuccaguggagacagcucguu

SEQ ID NO: 12519 - RNA, 21 nt, RNAi-antisense strand
cgagcugucuccacuggaguu

SEQ ID NO: 12520 - DNA, 21 bp, Homo sapiens
gaccacacctgctgccgagta

SEQ ID NO: 12521 - RNA, 21 nt, RNAi-sense strand
ccacaccugcugccgaguauu

SEQ ID NO: 12522 - RNA, 21 nt, RNAi-antisense strand
uacucggcagcaggugugguu

SEQ ID NO: 12523 - DNA, 21 bp, Homo sapiens
gagtactttgaacgtggcgtg

SEQ ID NO: 12524 - RNA, 21 nt, RNAi-sense strand
guacuuugaacguggcguguu

SEQ ID NO: 12525 - RNA, 21 nt, RNAi-antisense strand
cacgccacguucaaaguacuu

SEQ ID NO: 12526 - DNA, 21 bp, Homo sapiens
gagccatggcatcgacgacct

SEQ ID NO: 12527 - RNA, 21 nt, RNAi-sense strand
gccauggcaucgacgaccuuu

SEQ ID NO: 12528 - RNA, 21 nt, RNAi-antisense strand
aggucgucgaugccauggcuu

SEQ ID NO: 12529 - DNA, 21 bp, Homo sapiens
gaaggtggtatggatcacagc

SEQ ID NO: 12530 - RNA, 21 nt, RNAi-sense strand
aggugguauggaucacagcuu

SEQ ID NO: 12531 - RNA, 21 nt, RNAi-antisense strand
gcugugauccauaccaccuuu

SEQ ID NO: 12532 - DNA, 21 bp, Homo sapiens
gatcacagccaccatgccata

SEQ ID NO: 12533 - RNA, 21 nt, RNAi-sense strand
ucacagccaccaugccauauu

SEQ ID NO: 12534 - RNA, 21 nt, RNAi-antisense strand
uauggcaugguggcugugauu

SEQ ID NO: 12535 - DNA, 21 bp, Homo sapiens
gagccatagacggcatcagag

SEQ ID NO: 12536 - RNA, 21 nt, RNAi-sense strand
gccauagacggcaucagaguu

SEQ ID NO: 12537 - RNA, 21 nt, RNAi-antisense strand
cucugaugccgucuauggcuu

SEQ ID NO: 12538 - DNA, 21 bp, Homo sapiens
gacggcatcagagcatacctg

SEQ ID NO: 12539 - RNA, 21 nt, RNAi-sense strand
cggcaucagagcauaccuguu

SEQ ID NO: 12540 - RNA, 21 nt, RNAi-antisense strand
cagguaugcucugaugccguu

SEQ ID NO: 12541 - DNA, 21 bp, Homo sapiens
gagcatacctgagcgttgact

SEQ ID NO: 12542 - RNA, 21 nt, RNAi-sense strand
gcauaccugagcguugacuuu

SEQ ID NO: 12543 - RNA, 21 nt, RNAi-antisense strand
agucaacgcucagguaugcuu

SEQ ID NO: 12544 - DNA, 21 bp, Homo sapiens
gagcgttgacttctaccggct

SEQ ID NO: 12545 - RNA, 21 nt, RNAi-sense strand
gcguugacuucuaccggcuuu

SEQ ID NO: 12546 - RNA, 21 nt, RNAi-antisense strand
agccgguagaagucaacgcuu

SEQ ID NO: 12547 - DNA, 21 bp, Homo sapiens
gacttctaccggctctgcgag

SEQ ID NO: 12548 - RNA, 21 nt, RNAi-sense strand
cuucuaccggcucugcgaguu

SEQ ID NO: 12549 - RNA, 21 nt, RNAi-antisense strand
cucgcagagccgguagaaguu

SEQ ID NO: 12550 - DNA, 21 bp, Homo sapiens
gaggcgtctgtttggattgac

SEQ ID NO: 12551 - RNA, 21 nt, RNAi-sense strand
ggcgucuguuuggauugacuu

SEQ ID NO: 12552 - RNA, 21 nt, RNAi-antisense strand
gucaauccaaacagacgccuu

SEQ ID NO: 12553 - DNA, 21 bp, Homo sapiens
gatcgccttctccagctacaa

SEQ ID NO: 12554 - RNA, 21 nt, RNAi-sense strand
ucgccuucuccagcuacaauu

SEQ ID NO: 12555 - RNA, 21 nt, RNAi-antisense strand
uuguagcuggagaaggcgauu

SEQ ID NO: 12556 - DNA, 21 bp, Homo sapiens
gacgcgattgtcaccacctcc

SEQ ID NO: 12557 - RNA, 21 nt, RNAi-sense strand
cgcgauugucaccaccuccuu

SEQ ID NO: 12558 - RNA, 21 nt, RNAi-antisense strand
ggagguggugacaaucgcguu

SEQ ID NO: 12559 - DNA, 21 bp, Homo sapiens
gattgtcaccacctccatcaa

SEQ ID NO: 12560 - RNA, 21 nt, RNAi-sense strand
uugucaccaccuccaucaauu

SEQ ID NO: 12561 - RNA, 21 nt, RNAi-antisense strand
uugauggagguggugacaauu

SEQ ID NO: 12562 - DNA, 21 bp, Homo sapiens
gacgagcttctcctccggctt

SEQ ID NO: 12563 - RNA, 21 nt, RNAi-sense strand
cgagcuucuccuccggcuuuu

SEQ ID NO: 12564 - RNA, 21 nt, RNAi-antisense strand
aagccggaggagaagcucguu

SEQ ID NO: 12565 - DNA, 21 bp, Homo sapiens
gagcttctcctccggcttcgt

SEQ ID NO: 12566 - RNA, 21 nt, RNAi-sense strand
gcuucuccuccggcuucguuu

SEQ ID NO: 12567 - RNA, 21 nt, RNAi-antisense strand
acgaagccggaggagaagcuu

SEQ ID NO: 12568 - DNA, 21 bp, Homo sapiens
gatgagttccagctgctgcac

SEQ ID NO: 12569 - RNA, 21 nt, RNAi-sense strand
ugaguuccagcugcugcacuu

SEQ ID NO: 12570 - RNA, 21 nt, RNAi-antisense strand
gugcagcagcuggaacucauu

SEQ ID NO: 12571 - DNA, 21 bp, Homo sapiens
gagttccagctgctgcacaga

SEQ ID NO: 12572 - RNA, 21 nt, RNAi-sense strand
guuccagcugcugcacagauu

SEQ ID NO: 12573 - RNA, 21 nt, RNAi-antisense strand
ucugugcagcagcuggaacuu

SEQ ID NO: 12574 - DNA, 21 bp, Homo sapiens
gacaccgtgagctcttcacgc

SEQ ID NO: 12575 - RNA, 21 nt, RNAi-sense strand
caccgugagcucuucacgcuu

SEQ ID NO: 12576 - RNA, 21 nt, RNAi-antisense strand
gcgugaagagcucacgguguu

SEQ ID NO: 12577 - DNA, 21 bp, Homo sapiens
gagctcttcacgctcttcatc

SEQ ID NO: 12578 - RNA, 21 nt, RNAi-sense strand
gcucuucacgcucuucaucuu

SEQ ID NO: 12579 - RNA, 21 nt, RNAi-antisense strand
gaugaagagcgugaagagcuu

SEQ ID NO: 12580 - DNA, 21 bp, Homo sapiens
gagtgctcatcgaagccatcg

SEQ ID NO: 12581 - RNA, 21 nt, RNAi-sense strand
gugcucaucgaagccaucguu

SEQ ID NO: 12582 - RNA, 21 nt, RNAi-antisense strand
cgauggcuucgaugagcacuu

SEQ ID NO: 12583 - DNA, 21 bp, Homo sapiens
gagtggcctggttctatggtg

SEQ ID NO: 12584 - RNA, 21 nt, RNAi-sense strand
guggccugguucuaugguguu

SEQ ID NO: 12585 - RNA, 21 nt, RNAi-antisense strand
caccauagaaccaggccacuu

SEQ ID NO: 12586 - DNA, 21 bp, Homo sapiens
gacgacatccagcagatgacc

SEQ ID NO: 12587 - RNA, 21 nt, RNAi-sense strand
cgacauccagcagaugaccuu

SEQ ID NO: 12588 - RNA, 21 nt, RNAi-antisense strand
ggucaucugcuggaugucguu

SEQ ID NO: 12589 - DNA, 21 bp, Homo sapiens
gagagaaactggcctacgcca

SEQ ID NO: 12590 - RNA, 21 nt, RNAi-sense strand
gagaaacuggccuacgccauu

SEQ ID NO: 12591 - RNA, 21 nt, RNAi-antisense strand
uggcguaggccaguuucucuu

SEQ ID NO: 12592 - DNA, 21 bp, Homo sapiens
gagaaactggcctacgccatt

SEQ ID NO: 12593 - RNA, 21 nt, RNAi-sense strand
gaaacuggccuacgccauuuu

SEQ ID NO: 12594 - RNA, 21 nt, RNAi-antisense strand
aauggcguaggccaguuucuu

SEQ ID NO: 12595 - DNA, 21 bp, Homo sapiens
gaaactggcctacgccattgc

SEQ ID NO: 12596 - RNA, 21 nt, RNAi-sense strand
aacuggccuacgccauugcuu

SEQ ID NO: 12597 - RNA, 21 nt, RNAi-antisense strand
gcaauggcguaggccaguuuu

SEQ ID NO: 12598 - DNA, 21 bp, Homo sapiens
gagaaggaccgtgagctggtg

SEQ ID NO: 12599 - RNA, 21 nt, RNAi-sense strand
gaaggaccgugagcugguguu

SEQ ID NO: 12600 - RNA, 21 nt, RNAi-antisense strand
caccagcucacgguccuucuu

SEQ ID NO: 12601 - DNA, 21 bp, Homo sapiens
gaaggaccgtgagctggtgga

SEQ ID NO: 12602 - RNA, 21 nt, RNAi-sense strand
aggaccgugagcugguggauu

SEQ ID NO: 12603 - RNA, 21 nt, RNAi-antisense strand
uccaccagcucacgguccuuu

SEQ ID NO: 12604 - DNA, 21 bp, Homo sapiens
gaccgtgagctggtggacaga

SEQ ID NO: 12605 - RNA, 21 nt, RNAi-sense strand
ccgugagcugguggacagauu

SEQ ID NO: 12606 - RNA, 21 nt, RNAi-antisense strand
ucuguccaccagcucacgguu

SEQ ID NO: 12607 - DNA, 21 bp, Homo sapiens
gagagacacgaacaaaccaag

SEQ ID NO: 12608 - RNA, 21 nt, RNAi-sense strand
gagacacgaacaaaccaaguu

SEQ ID NO: 12609 - RNA, 21 nt, RNAi-antisense strand
cuugguuuguucgugucucuu

SEQ ID NO: 12610 - DNA, 21 bp, Homo sapiens
gagacacgaacaaaccaagga

SEQ ID NO: 12611 - RNA, 21 nt, RNAi-sense strand
gacacgaacaaaccaaggauu

SEQ ID NO: 12612 - RNA, 21 nt, RNAi-antisense strand
uccuugguuuguucgugucuu

SEQ ID NO: 12613 - DNA, 21 bp, Homo sapiens
gacacgaacaaaccaaggaaa

SEQ ID NO: 12614 - RNA, 21 nt, RNAi-sense strand
cacgaacaaaccaaggaaauu

SEQ ID NO: 12615 - RNA, 21 nt, RNAi-antisense strand
uuuccuugguuuguucguguu

SEQ ID NO: 12616 - DNA, 21 bp, Homo sapiens
gaacaaaccaaggaaatctaa

SEQ ID NO: 12617 - RNA, 21 nt, RNAi-sense strand
acaaaccaaggaaaucuaauu

SEQ ID NO: 12618 - RNA, 21 nt, RNAi-antisense strand
uuagauuuccuugguuuguuu

SEQ ID NO: 12619 - DNA, 21 bp, Homo sapiens
gaaatctaagtttcgagagaa

SEQ ID NO: 12620 - RNA, 21 nt, RNAi-sense strand
aaucuaaguuucgagagaauu

SEQ ID NO: 12621 - RNA, 21 nt, RNAi-antisense strand
uucucucgaaacuuagauuuu

SEQ ID NO: 12622 - DNA, 21 bp, Homo sapiens
gaagactcctctcttctgact

SEQ ID NO: 12623 - RNA, 21 nt, RNAi-sense strand
agacuccucucuucugacuuu

SEQ ID NO: 12624 - RNA, 21 nt, RNAi-antisense strand
agucagaagagaggagucuuu

SEQ ID NO: 12625 - DNA, 21 bp, Homo sapiens
gactcctctcttctgactgtt

SEQ ID NO: 12626 - RNA, 21 nt, RNAi-sense strand
cuccucucuucugacuguuuu

SEQ ID NO: 12627 - RNA, 21 nt, RNAi-antisense strand
aacagucagaagagaggaguu

SEQ ID NO: 12628 - DNA, 21 bp, Homo sapiens
gactgtttacacctttccgtg

SEQ ID NO: 12629 - RNA, 21 nt, RNAi-sense strand
cuguuuacaccuuuccguguu

SEQ ID NO: 12630 - RNA, 21 nt, RNAi-antisense strand
cacggaaagguguaaacaguu

SEQ ID NO: 12631 - DNA, 21 bp, Homo sapiens
gacgtagatctgtgcagcgag

SEQ ID NO: 12632 - RNA, 21 nt, RNAi-sense strand
cguagaucugugcagcgaguu

SEQ ID NO: 12633 - RNA, 21 nt, RNAi-antisense strand
cucgcugcacagaucuacguu

SEQ ID NO: 12634 - DNA, 21 bp, Homo sapiens
gatctgtgcagcgaggtccac

SEQ ID NO: 12635 - RNA, 21 nt, RNAi-sense strand
ucugugcagcgagguccacuu

SEQ ID NO: 12636 - RNA, 21 nt, RNAi-antisense strand
guggaccucgcugcacagauu

SEQ ID NO: 12637 - DNA, 21 bp, Homo sapiens
gatcacgatccttgtagacgc

SEQ ID NO: 12638 - RNA, 21 nt, RNAi-sense strand
ucacgauccuuguagacgcuu

SEQ ID NO: 12639 - RNA, 21 nt, RNAi-antisense strand
gcgucuacaaggaucgugauu

SEQ ID NO: 12640 - DNA, 21 bp, Homo sapiens
gatccttgtagacgcacctgc

SEQ ID NO: 12641 - RNA, 21 nt, RNAi-sense strand
uccuuguagacgcaccugcuu

SEQ ID NO: 12642 - RNA, 21 nt, RNAi-antisense strand
gcaggugcgucuacaaggauu

SEQ ID NO: 12643 - DNA, 21 bp, Homo sapiens
gaaggtgaaatggaggaaacc

SEQ ID NO: 12644 - RNA, 21 nt, RNAi-sense strand
aggugaaauggaggaaaccuu

SEQ ID NO: 12645 - RNA, 21 nt, RNAi-antisense strand
gguuuccuccauuucaccuuu

SEQ ID NO: 12646 - DNA, 21 bp, Homo sapiens
gaaatggaggaaaccacaaat

SEQ ID NO: 12647 - RNA, 21 nt, RNAi-sense strand
aauggaggaaaccacaaauuu

SEQ ID NO: 12648 - RNA, 21 nt, RNAi-antisense strand
auuugugguuuccuccauuuu

SEQ ID NO: 12649 - DNA, 21 bp, Homo sapiens
gaggaaaccacaaattcatgc

SEQ ID NO: 12650 - RNA, 21 nt, RNAi-sense strand
ggaaaccacaaauucaugcuu

SEQ ID NO: 12651 - RNA, 21 nt, RNAi-antisense strand
gcaugaauuugugguuuccuu

SEQ ID NO: 12652 - DNA, 21 bp, Homo sapiens
gaaaccacaaattcatgcaaa

SEQ ID NO: 12653 - RNA, 21 nt, RNAi-sense strand
aaccacaaauucaugcaaauu

SEQ ID NO: 12654 - RNA, 21 nt, RNAi-antisense strand
uuugcaugaauuugugguuuu

SEQ ID NO: 12655 - DNA, 21 bp, Homo sapiens
gaggccgtaaattgagcgttc

SEQ ID NO: 12656 - RNA, 21 nt, RNAi-sense strand
ggccguaaauugagcguucuu

SEQ ID NO: 12657 - RNA, 21 nt, RNAi-antisense strand
gaacgcucaauuuacggccuu

SEQ ID NO: 12658 - DNA, 21 bp, Homo sapiens
gagcgttcagttgacacattg

SEQ ID NO: 12659 - RNA, 21 nt, RNAi-sense strand
gcguucaguugacacauuguu

SEQ ID NO: 12660 - RNA, 21 nt, RNAi-antisense strand
caaugugucaacugaacgcuu

SEQ ID NO: 12661 - DNA, 21 bp, Homo sapiens
gacacattgcacacacagtct

SEQ ID NO: 12662 - RNA, 21 nt, RNAi-sense strand
cacauugcacacacagucuuu

SEQ ID NO: 12663 - RNA, 21 nt, RNAi-antisense strand
agacugugugugcaauguguu

SEQ ID NO: 12664 - DNA, 21 bp, Homo sapiens
gaaaccagctcaggctactgc

SEQ ID NO: 12665 - RNA, 21 nt, RNAi-sense strand
aaccagcucaggcuacugcuu

SEQ ID NO: 12666 - RNA, 21 nt, RNAi-antisense strand
gcaguagccugagcugguuuu

SEQ ID NO: 12667 - DNA, 21 bp, Homo sapiens
gaccaacactctgcctggcct

SEQ ID NO: 12668 - RNA, 21 nt, RNAi-sense strand
ccaacacucugccuggccuuu

SEQ ID NO: 12669 - RNA, 21 nt, RNAi-antisense strand
aggccaggcagaguguugguu

SEQ ID NO: 12670 - DNA, 21 bp, Homo sapiens
gaatgcagtatccgcgagcct

SEQ ID NO: 12671 - RNA, 21 nt, RNAi-sense strand
augcaguauccgcgagccuuu

SEQ ID NO: 12672 - RNA, 21 nt, RNAi-antisense strand
aggcucgcggauacugcauuu

SEQ ID NO: 12673 - DNA, 21 bp, Homo sapiens
gagcctgcttgctgatattgc

SEQ ID NO: 12674 - RNA, 21 nt, RNAi-sense strand
gccugcuugcugauauugcuu

SEQ ID NO: 12675 - RNA, 21 nt, RNAi-antisense strand
gcaauaucagcaagcaggcuu

SEQ ID NO: 12676 - DNA, 21 bp, Homo sapiens
gagtgaaggatgttggccaaa

SEQ ID NO: 12677 - RNA, 21 nt, RNAi-sense strand
gugaaggauguuggccaaauu

SEQ ID NO: 12678 - RNA, 21 nt, RNAi-antisense strand
uuuggccaacauccuucacuu

SEQ ID NO: 12679 - DNA, 21 bp, Homo sapiens
gacaggaaagtggatgccata

SEQ ID NO: 12680 - RNA, 21 nt, RNAi-sense strand
caggaaaguggaugccauauu

SEQ ID NO: 12681 - RNA, 21 nt, RNAi-antisense strand
uauggcauccacuuuccuguu

SEQ ID NO: 12682 - DNA, 21 bp, Homo sapiens
gaaagtggatgccatagtttg

SEQ ID NO: 12683 - RNA, 21 nt, RNAi-sense strand
aaguggaugccauaguuuguu

SEQ ID NO: 12684 - RNA, 21 nt, RNAi-antisense strand
caaacuauggcauccacuuuu

SEQ ID NO: 12685 - DNA, 21 bp, Homo sapiens
gatgccatagtttgaattcat

SEQ ID NO: 12686 - RNA, 21 nt, RNAi-sense strand
ugccauaguuugaauucauuu

SEQ ID NO: 12687 - RNA, 21 nt, RNAi-antisense strand
augaauucaaacuauggcauu

SEQ ID NO: 12688 - DNA, 21 bp, Homo sapiens
gaattcatgcctcaagtcggt

SEQ ID NO: 12689 - RNA, 21 nt, RNAi-sense strand
auucaugccucaagucgguuu

SEQ ID NO: 12690 - RNA, 21 nt, RNAi-antisense strand
accgacuugaggcaugaauuu

SEQ ID NO: 12691 - DNA, 21 bp, Homo sapiens
gactggagtgtaatgctcggt

SEQ ID NO: 12692 - RNA, 21 nt, RNAi-sense strand
cuggaguguaaugcucgguuu

SEQ ID NO: 12693 - RNA, 21 nt, RNAi-antisense strand
accgagcauuacacuccaguu

SEQ ID NO: 12694 - DNA, 21 bp, Homo sapiens
gagccgtcagcctgtgaactg

SEQ ID NO: 12695 - RNA, 21 nt, RNAi-sense strand
gccgucagccugugaacuguu

SEQ ID NO: 12696 - RNA, 21 nt, RNAi-antisense strand
caguucacaggcugacggcuu

SEQ ID NO: 12697 - DNA, 21 bp, Homo sapiens
gaactgccaggcagctgcagt

SEQ ID NO: 12698 - RNA, 21 nt, RNAi-sense strand
acugccaggcagcugcaguuu

SEQ ID NO: 12699 - RNA, 21 nt, RNAi-antisense strand
acugcagcugccuggcaguuu

SEQ ID NO: 12700 - DNA, 21 bp, Homo sapiens
gaagacagcacagagagcggc

SEQ ID NO: 12701 - RNA, 21 nt, RNAi-sense strand
agacagcacagagagcggcuu

SEQ ID NO: 12702 - RNA, 21 nt, RNAi-antisense strand
gccgcucucugugcugucuuu

SEQ ID NO: 12703 - DNA, 21 bp, Homo sapiens
gacagcacagagagcggcttc

SEQ ID NO: 12704 - RNA, 21 nt, RNAi-sense strand
cagcacagagagcggcuucuu

SEQ ID NO: 12705 - RNA, 21 nt, RNAi-antisense strand
gaagccgcucucugugcuguu

SEQ ID NO: 12706 - DNA, 21 bp, Homo sapiens
gaccaatctctattcagcatc

SEQ ID NO: 12707 - RNA, 21 nt, RNAi-sense strand
ccaaucucuauucagcaucuu

SEQ ID NO: 12708 - RNA, 21 nt, RNAi-antisense strand
gaugcugaauagagauugguu

SEQ ID NO: 12709 - DNA, 21 bp, Homo sapiens
tacctgctcttcatggtcatt

SEQ ID NO: 12710 - RNA, 21 nt, RNAi-sense strand
ccugcucuucauggucauuuu

SEQ ID NO: 12711 - RNA, 21 nt, RNAi-antisense strand
aaugaccaugaagagcagguu

SEQ ID NO: 12712 - DNA, 21 bp, Homo sapiens
tatgtcggcttcttctacaac

SEQ ID NO: 12713 - RNA, 21 nt, RNAi-sense strand
ugucggcuucuucuacaacuu

SEQ ID NO: 12714 - RNA, 21 nt, RNAi-antisense strand
guuguagaagaagccgacauu

SEQ ID NO: 12715 - DNA, 21 bp, Homo sapiens
tacaacgtcatcatcgcctgg

SEQ ID NO: 12716 - RNA, 21 nt, RNAi-sense strand
caacgucaucaucgccugguu

SEQ ID NO: 12717 - RNA, 21 nt, RNAi-antisense strand
ccaggcgaugaugacguuguu

SEQ ID NO: 12718 - DNA, 21 bp, Homo sapiens
tatctcttctcctccttcacc

SEQ ID NO: 12719 - RNA, 21 nt, RNAi-sense strand
ucucuucuccuccuucaccuu

SEQ ID NO: 12720 - RNA, 21 nt, RNAi-antisense strand
ggugaaggaggagaagagauu

SEQ ID NO: 12721 - DNA, 21 bp, Homo sapiens
tactttgaacgtggcgtgctg

SEQ ID NO: 12722 - RNA, 21 nt, RNAi-sense strand
cuuugaacguggcgugcuguu

SEQ ID NO: 12723 - RNA, 21 nt, RNAi-antisense strand
cagcacgccacguucaaaguu

SEQ ID NO: 12724 - DNA, 21 bp, Homo sapiens
tatggatcacagccaccatgc

SEQ ID NO: 12725 - RNA, 21 nt, RNAi-sense strand
uggaucacagccaccaugcuu

SEQ ID NO: 12726 - RNA, 21 nt, RNAi-antisense strand
gcaugguggcugugauccauu

SEQ ID NO: 12727 - DNA, 21 bp, Homo sapiens
tagacggcatcagagcatacc

SEQ ID NO: 12728 - RNA, 21 nt, RNAi-sense strand
gacggcaucagagcauaccuu

SEQ ID NO: 12729 - RNA, 21 nt, RNAi-antisense strand
gguaugcucugaugccgucuu

SEQ ID NO: 12730 - DNA, 21 bp, Homo sapiens
tacctgagcgttgacttctac

SEQ ID NO: 12731 - RNA, 21 nt, RNAi-sense strand
ccugagcguugacuucuacuu

SEQ ID NO: 12732 - RNA, 21 nt, RNAi-antisense strand
guagaagucaacgcucagguu

SEQ ID NO: 12733 - DNA, 21 bp, Homo sapiens
tacaacaagttcaccaacaac

SEQ ID NO: 12734 - RNA, 21 nt, RNAi-sense strand
caacaaguucaccaacaacuu

SEQ ID NO: 12735 - RNA, 21 nt, RNAi-antisense strand
guuguuggugaacuuguuguu

SEQ ID NO: 12736 - DNA, 21 bp, Homo sapiens
tacatggcacagaagcacagt

SEQ ID NO: 12737 - RNA, 21 nt, RNAi-sense strand
cauggcacagaagcacaguuu

SEQ ID NO: 12738 - RNA, 21 nt, RNAi-antisense strand
acugugcuucugugccauguu

SEQ ID NO: 12739 - DNA, 21 bp, Homo sapiens
tatggagtcagtgatcaccgg

SEQ ID NO: 12740 - RNA, 21 nt, RNAi-sense strand
uggagucagugaucaccgguu

SEQ ID NO: 12741 - RNA, 21 nt, RNAi-antisense strand
ccggugaucacugacuccauu

SEQ ID NO: 12742 - DNA, 21 bp, Homo sapiens
tacgtcttcacgctcctggac

SEQ ID NO: 12743 - RNA, 21 nt, RNAi-sense strand
cgucuucacgcuccuggacuu

SEQ ID NO: 12744 - RNA, 21 nt, RNAi-antisense strand
guccaggagcgugaagacguu

SEQ ID NO: 12745 - DNA, 21 bp, Homo sapiens
tactggcggctgtgctggaag

SEQ ID NO: 12746 - RNA, 21 nt, RNAi-sense strand
cuggcggcugugcuggaaguu

SEQ ID NO: 12747 - RNA, 21 nt, RNAi-antisense strand
cuuccagcacagccgccaguu

SEQ ID NO: 12748 - DNA, 21 bp, Homo sapiens
tatgcggcctacaagttctgc

SEQ ID NO: 12749 - RNA, 21 nt, RNAi-sense strand
ugcggccuacaaguucugcuu

SEQ ID NO: 12750 - RNA, 21 nt, RNAi-antisense strand
gcagaacuuguaggccgcauu

SEQ ID NO: 12751 - DNA, 21 bp, Homo sapiens
tacaagttctgcagcctgcct

SEQ ID NO: 12752 - RNA, 21 nt, RNAi-sense strand
caaguucugcagccugccuuu

SEQ ID NO: 12753 - RNA, 21 nt, RNAi-antisense strand
aggcaggcugcagaacuuguu

SEQ ID NO: 12754 - DNA, 21 bp, Homo sapiens
taagtttcgagagaaaggagg

SEQ ID NO: 12755 - RNA, 21 nt, RNAi-sense strand
aguuucgagagaaaggagguu

SEQ ID NO: 12756 - RNA, 21 nt, RNAi-antisense strand
ccuccuuucucucgaaacuuu

SEQ ID NO: 12757 - DNA, 21 bp, Homo sapiens
tactcttcaacctctactgaa

SEQ ID NO: 12758 - RNA, 21 nt, RNAi-sense strand
cucuucaaccucuacugaauu

SEQ ID NO: 12759 - RNA, 21 nt, RNAi-antisense strand
uucaguagagguugaagaguu

SEQ ID NO: 12760 - DNA, 21 bp, Homo sapiens
taataacgacgtagatctgtg

SEQ ID NO: 12761 - RNA, 21 nt, RNAi-sense strand
auaacgacguagaucuguguu

SEQ ID NO: 12762 - RNA, 21 nt, RNAi-antisense strand
cacagaucuacgucguuauuu

SEQ ID NO: 12763 - DNA, 21 bp, Homo sapiens
taacgacgtagatctgtgcag

SEQ ID NO: 12764 - RNA, 21 nt, RNAi-sense strand
acgacguagaucugugcaguu

SEQ ID NO: 12765 - RNA, 21 nt, RNAi-antisense strand
cugcacagaucuacgucguuu

SEQ ID NO: 12766 - DNA, 21 bp, Homo sapiens
tagatctgtgcagcgaggtcc

SEQ ID NO: 12767 - RNA, 21 nt, RNAi-sense strand
gaucugugcagcgagguccuu

SEQ ID NO: 12768 - RNA, 21 nt, RNAi-antisense strand
ggaccucgcugcacagaucuu

SEQ ID NO: 12769 - DNA, 21 bp, Homo sapiens
taacttcatgctgtctgtgtg

SEQ ID NO: 12770 - RNA, 21 nt, RNAi-sense strand
acuucaugcugucuguguguu

SEQ ID NO: 12771 - RNA, 21 nt, RNAi-antisense strand
cacacagacagcaugaaguuu

SEQ ID NO: 12772 - DNA, 21 bp, Homo sapiens
tagacgcacctgctgagaatc

SEQ ID NO: 12773 - RNA, 21 nt, RNAi-sense strand
gacgcaccugcugagaaucuu

SEQ ID NO: 12774 - RNA, 21 nt, RNAi-antisense strand
gauucucagcaggugcgucuu

SEQ ID NO: 12775 - DNA, 21 bp, Homo sapiens
tagcttcctagaccatttact

SEQ ID NO: 12776 - RNA, 21 nt, RNAi-sense strand
gcuuccuagaccauuuacuuu

SEQ ID NO: 12777 - RNA, 21 nt, RNAi-antisense strand
aguaaauggucuaggaagcuu

SEQ ID NO: 12778 - DNA, 21 bp, Homo sapiens
tagctgtgcagaaggtgaaat

SEQ ID NO: 12779 - RNA, 21 nt, RNAi-sense strand
gcugugcagaaggugaaauuu

SEQ ID NO: 12780 - RNA, 21 nt, RNAi-antisense strand
auuucaccuucugcacagcuu

SEQ ID NO: 12781 - DNA, 21 bp, Homo sapiens
taaattgagcgttcagttgac

SEQ ID NO: 12782 - RNA, 21 nt, RNAi-sense strand
aauugagcguucaguugacuu

SEQ ID NO: 12783 - RNA, 21 nt, RNAi-antisense strand
gucaacugaacgcucaauuuu

SEQ ID NO: 12784 - DNA, 21 bp, Homo sapiens
tatgtctcaccaggaaattct

SEQ ID NO: 12785 - RNA, 21 nt, RNAi-sense strand
ugucucaccaggaaauucuuu

SEQ ID NO: 12786 - RNA, 21 nt, RNAi-antisense strand
agaauuuccuggugagacauu

SEQ ID NO: 12787 - DNA, 21 bp, Homo sapiens
tatgttcttgcagcagagaga

SEQ ID NO: 12788 - RNA, 21 nt, RNAi-sense strand
uguucuugcagcagagagauu

SEQ ID NO: 12789 - RNA, 21 nt, RNAi-antisense strand
ucucucugcugcaagaacauu

SEQ ID NO: 12790 - DNA, 21 bp, Homo sapiens
tactgccactcaggcagcctg

SEQ ID NO: 12791 - RNA, 21 nt, RNAi-sense strand
cugccacucaggcagccuguu

SEQ ID NO: 12792 - RNA, 21 nt, RNAi-antisense strand
caggcugccugaguggcaguu

SEQ ID NO: 12793 - DNA, 21 bp, Homo sapiens
tatttctctcaggtgcgtgcc

SEQ ID NO: 12794 - RNA, 21 nt, RNAi-sense strand
uuucucucaggugcgugccuu

SEQ ID NO: 12795 - RNA, 21 nt, RNAi-antisense strand
ggcacgcaccugagagaaauu

SEQ ID NO: 12796 - DNA, 21 bp, Homo sapiens
tatccgcgagcctgcttgctg

SEQ ID NO: 12797 - RNA, 21 nt, RNAi-sense strand
uccgcgagccugcuugcuguu

SEQ ID NO: 12798 - RNA, 21 nt, RNAi-antisense strand
cagcaagcaggcucgcggauu

SEQ ID NO: 12799 - DNA, 21 bp, Homo sapiens
tagcaatactgagtgaaggat

SEQ ID NO: 12800 - RNA, 21 nt, RNAi-sense strand
gcaauacugagugaaggauuu

SEQ ID NO: 12801 - RNA, 21 nt, RNAi-antisense strand
auccuucacucaguauugcuu

SEQ ID NO: 12802 - DNA, 21 bp, Homo sapiens
tactgagtgaaggatgttggc

SEQ ID NO: 12803 - RNA, 21 nt, RNAi-sense strand
cugagugaaggauguuggcuu

SEQ ID NO: 12804 - RNA, 21 nt, RNAi-antisense strand
gccaacauccuucacucaguu

SEQ ID NO: 12805 - DNA, 21 bp, Homo sapiens
tagtttgaattcatgcctcaa

SEQ ID NO: 12806 - RNA, 21 nt, RNAi-sense strand
guuugaauucaugccucaauu

SEQ ID NO: 12807 - RNA, 21 nt, RNAi-antisense strand
uugaggcaugaauucaaacuu

SEQ ID NO: 12808 - DNA, 21 bp, Homo sapiens
catagacggcatcagagcata

SEQ ID NO: 12809 - RNA, 21 nt, RNAi-sense strand
uagacggcaucagagcauauu

SEQ ID NO: 12810 - RNA, 21 nt, RNAi-antisense strand
uaugcucugaugccgucuauu

SEQ ID NO: 12811 - DNA, 21 bp, Homo sapiens
cagagcatacctgagcgttga

SEQ ID NO: 12812 - RNA, 21 nt, RNAi-sense strand
gagcauaccugagcguugauu

SEQ ID NO: 12813 - RNA, 21 nt, RNAi-antisense strand
ucaacgcucagguaugcucuu

SEQ ID NO: 12814 - DNA, 21 bp, Homo sapiens
catacctgagcgttgacttct

SEQ ID NO: 12815 - RNA, 21 nt, RNAi-sense strand
uaccugagcguugacuucuuu

SEQ ID NO: 12816 - RNA, 21 nt, RNAi-antisense strand
agaagucaacgcucagguauu

SEQ ID NO: 12817 - DNA, 21 bp, Homo sapiens
caacggtggcatctacgtctt

SEQ ID NO: 12818 - RNA, 21 nt, RNAi-sense strand
acgguggcaucuacgucuuuu

SEQ ID NO: 12819 - RNA, 21 nt, RNAi-antisense strand
aagacguagaugccaccguuu

SEQ ID NO: 12820 - DNA, 21 bp, Homo sapiens
gagcatacctgagcgttgact

SEQ ID NO: 12821 - RNA, 21 nt, RNAi-sense strand
gcauaccugagcguugacuuu

SEQ ID NO: 12822 - RNA, 21 nt, RNAi-antisense strand
agucaacgcucagguaugcuu

SEQ ID NO: 12823 - DNA, 21 bp, Homo sapiens
gagaaactggcctacgccatt

SEQ ID NO: 12824 - RNA, 21 nt, RNAi-sense strand
gaaacuggccuacgccauuuu

SEQ ID NO: 12825 - RNA, 21 nt, RNAi-antisense strand
aauggcguaggccaguuucuu

SEQ ID NO: 12826 - DNA, 21 bp, Homo sapiens
tatgtcggcttcttctacaac

SEQ ID NO: 12827 - RNA, 21 nt, RNAi-sense strand
ugucggcuucuucuacaacuu

SEQ ID NO: 12828 - RNA, 21 nt, RNAi-antisense strand
guuguagaagaagccgacauu

SEQ ID NO: 12829 - DNA, 21 bp, Homo sapiens
tacctgagcgttgacttctac

SEQ ID NO: 12830 - RNA, 21 nt, RNAi-sense strand
ccugagcguugacuucuacuu

SEQ ID NO: 12831 - RNA, 21 nt, RNAi-antisense strand
guagaagucaacgcucagguu

SEQ ID NO: 12832 - DNA, 21 bp, Homo sapiens
aactggcgctccggtgaagta

SEQ ID NO: 12833 - RNA, 21 nt, RNAi-sense strand
cuggcgcuccggugaaguauu

SEQ ID NO: 12834 - RNA, 21 nt, RNAi-antisense strand
uacuucaccggagcgccaguu

SEQ ID NO: 12835 - DNA, 21 bp, Homo sapiens
aagcgcctcaaatctatgcta

SEQ ID NO: 12836 - RNA, 21 nt, RNAi-sense strand
gcgccucaaaucuaugcuauu

SEQ ID NO: 12837 - RNA, 21 nt, RNAi-antisense strand
uagcauagauuugaggcgcuu

SEQ ID NO: 12838 - DNA, 21 bp, Homo sapiens
aaatctatgctaaggaaggat

SEQ ID NO: 12839 - RNA, 21 nt, RNAi-sense strand
aucuaugcuaaggaaggauuu

SEQ ID NO: 12840 - RNA, 21 nt, RNAi-antisense strand
auccuuccuuagcauagauuu

SEQ ID NO: 12841 - DNA, 21 bp, Homo sapiens
aatctatgctaaggaaggatg

SEQ ID NO: 12842 - RNA, 21 nt, RNAi-sense strand
ucuaugcuaaggaaggauguu

SEQ ID NO: 12843 - RNA, 21 nt, RNAi-antisense strand
cauccuuccuuagcauagauu

SEQ ID NO: 12844 - DNA, 21 bp, Homo sapiens
aaatgacaccagcgcctttga

SEQ ID NO: 12845 - RNA, 21 nt, RNAi-sense strand
augacaccagcgccuuugauu

SEQ ID NO: 12846 - RNA, 21 nt, RNAi-antisense strand
ucaaaggcgcuggugucauuu

SEQ ID NO: 12847 - DNA, 21 bp, Homo sapiens
aatgacaccagcgcctttgac

SEQ ID NO: 12848 - RNA, 21 nt, RNAi-sense strand
ugacaccagcgccuuugacuu

SEQ ID NO: 12849 - RNA, 21 nt, RNAi-antisense strand
gucaaaggcgcuggugucauu

SEQ ID NO: 12850 - DNA, 21 bp, Homo sapiens
aacaaacttcgagttgtggtg

SEQ ID NO: 12851 - RNA, 21 nt, RNAi-sense strand
caaacuucgaguugugguguu

SEQ ID NO: 12852 - RNA, 21 nt, RNAi-antisense strand
caccacaacucgaaguuuguu

SEQ ID NO: 12853 - DNA, 21 bp, Homo sapiens
aaacttcgagttgtggtggcc

SEQ ID NO: 12854 - RNA, 21 nt, RNAi-sense strand
acuucgaguugugguggccuu

SEQ ID NO: 12855 - RNA, 21 nt, RNAi-antisense strand
ggccaccacaacucgaaguuu

SEQ ID NO: 12856 - DNA, 21 bp, Homo sapiens
aacttcgagttgtggtggccg

SEQ ID NO: 12857 - RNA, 21 nt, RNAi-sense strand
cuucgaguugugguggccguu

SEQ ID NO: 12858 - RNA, 21 nt, RNAi-antisense strand
cggccaccacaacucgaaguu

SEQ ID NO: 12859 - DNA, 21 bp, Homo sapiens
aagacttacctttgaccaaca

SEQ ID NO: 12860 - RNA, 21 nt, RNAi-sense strand
gacuuaccuuugaccaacauu

SEQ ID NO: 12861 - RNA, 21 nt, RNAi-antisense strand
uguuggucaaagguaagucuu

SEQ ID NO: 12862 - DNA, 21 bp, Homo sapiens
aacagtcagctgagtttgaag

SEQ ID NO: 12863 - RNA, 21 nt, RNAi-sense strand
cagucagcugaguuugaaguu

SEQ ID NO: 12864 - RNA, 21 nt, RNAi-antisense strand
cuucaaacucagcugacuguu

SEQ ID NO: 12865 - DNA, 21 bp, Homo sapiens
aaggtggactcctgtgacaac

SEQ ID NO: 12866 - RNA, 21 nt, RNAi-sense strand
gguggacuccugugacaacuu

SEQ ID NO: 12867 - RNA, 21 nt, RNAi-antisense strand
guugucacaggaguccaccuu

SEQ ID NO: 12868 - DNA, 21 bp, Homo sapiens
aactgcagcaaacagagagag

SEQ ID NO: 12869 - RNA, 21 nt, RNAi-sense strand
cugcagcaaacagagagaguu

SEQ ID NO: 12870 - RNA, 21 nt, RNAi-antisense strand
cucucucuguuugcugcaguu

SEQ ID NO: 12871 - DNA, 21 bp, Homo sapiens
aaacagagagagatactgaag

SEQ ID NO: 12872 - RNA, 21 nt, RNAi-sense strand
acagagagagauacugaaguu

SEQ ID NO: 12873 - RNA, 21 nt, RNAi-antisense strand
cuucaguaucucucucuguuu

SEQ ID NO: 12874 - DNA, 21 bp, Homo sapiens
aacagagagagatactgaagc

SEQ ID NO: 12875 - RNA, 21 nt, RNAi-sense strand
cagagagagauacugaagcuu

SEQ ID NO: 12876 - RNA, 21 nt, RNAi-antisense strand
gcuucaguaucucucucuguu

SEQ ID NO: 12877 - DNA, 21 bp, Homo sapiens
aagcagagaaaggtgaaagcc

SEQ ID NO: 12878 - RNA, 21 nt, RNAi-sense strand
gcagagaaaggugaaagccuu

SEQ ID NO: 12879 - RNA, 21 nt, RNAi-antisense strand
ggcuuucaccuuucucugcuu

SEQ ID NO: 12880 - DNA, 21 bp, Homo sapiens
aaaggtgaaagccaggttgac

SEQ ID NO: 12881 - RNA, 21 nt, RNAi-sense strand
aggugaaagccagguugacuu

SEQ ID NO: 12882 - RNA, 21 nt, RNAi-antisense strand
gucaaccuggcuuucaccuuu

SEQ ID NO: 12883 - DNA, 21 bp, Homo sapiens
aaggtgaaagccaggttgacc

SEQ ID NO: 12884 - RNA, 21 nt, RNAi-sense strand
ggugaaagccagguugaccuu

SEQ ID NO: 12885 - RNA, 21 nt, RNAi-antisense strand
ggucaaccuggcuuucaccuu

SEQ ID NO: 12886 - DNA, 21 bp, Homo sapiens
aaagccaggttgaccattgct

SEQ ID NO: 12887 - RNA, 21 nt, RNAi-sense strand
agccagguugaccauugcuuu

SEQ ID NO: 12888 - RNA, 21 nt, RNAi-antisense strand
agcaauggucaaccuggcuuu

SEQ ID NO: 12889 - DNA, 21 bp, Homo sapiens
aagccaggttgaccattgctg

SEQ ID NO: 12890 - RNA, 21 nt, RNAi-sense strand
gccagguugaccauugcuguu

SEQ ID NO: 12891 - RNA, 21 nt, RNAi-antisense strand
cagcaauggucaaccuggcuu

SEQ ID NO: 12892 - DNA, 21 bp, Homo sapiens
aacttgtaggtggatacattg

SEQ ID NO: 12893 - RNA, 21 nt, RNAi-sense strand
cuuguagguggauacauuguu

SEQ ID NO: 12894 - RNA, 21 nt, RNAi-antisense strand
caauguauccaccuacaaguu

SEQ ID NO: 12895 - DNA, 21 bp, Homo sapiens
aaatagcctagcaatcatgac

SEQ ID NO: 12896 - RNA, 21 nt, RNAi-sense strand
auagccuagcaaucaugacuu

SEQ ID NO: 12897 - RNA, 21 nt, RNAi-antisense strand
gucaugauugcuaggcuauuu

SEQ ID NO: 12898 - DNA, 21 bp, Homo sapiens
aatagcctagcaatcatgaca

SEQ ID NO: 12899 - RNA, 21 nt, RNAi-sense strand
uagccuagcaaucaugacauu

SEQ ID NO: 12900 - RNA, 21 nt, RNAi-antisense strand
ugucaugauugcuaggcuauu

SEQ ID NO: 12901 - DNA, 21 bp, Homo sapiens
aatcatgacagatgcacttca

SEQ ID NO: 12902 - RNA, 21 nt, RNAi-sense strand
ucaugacagaugcacuucauu

SEQ ID NO: 12903 - RNA, 21 nt, RNAi-antisense strand
ugaagugcaucugucaugauu

SEQ ID NO: 12904 - DNA, 21 bp, Homo sapiens
aactgacctaagcgccatcat

SEQ ID NO: 12905 - RNA, 21 nt, RNAi-sense strand
cugaccuaagcgccaucauuu

SEQ ID NO: 12906 - RNA, 21 nt, RNAi-antisense strand
augauggcgcuuaggucaguu

SEQ ID NO: 12907 - DNA, 21 bp, Homo sapiens
aaagattcacctttggatttc

SEQ ID NO: 12908 - RNA, 21 nt, RNAi-sense strand
agauucaccuuuggauuucuu

SEQ ID NO: 12909 - RNA, 21 nt, RNAi-antisense strand
gaaauccaaaggugaaucuuu

SEQ ID NO: 12910 - DNA, 21 bp, Homo sapiens
aagattcacctttggatttca

SEQ ID NO: 12911 - RNA, 21 nt, RNAi-sense strand
gauucaccuuuggauuucauu

SEQ ID NO: 12912 - RNA, 21 nt, RNAi-antisense strand
ugaaauccaaaggugaaucuu

SEQ ID NO: 12913 - DNA, 21 bp, Homo sapiens
aagctgtgcaaagaactatcc

SEQ ID NO: 12914 - RNA, 21 nt, RNAi-sense strand
gcugugcaaagaacuauccuu

SEQ ID NO: 12915 - RNA, 21 nt, RNAi-antisense strand
ggauaguucuuugcacagcuu

SEQ ID NO: 12916 - DNA, 21 bp, Homo sapiens
aatggagatataatgctcatc

SEQ ID NO: 12917 - RNA, 21 nt, RNAi-sense strand
uggagauauaaugcucaucuu

SEQ ID NO: 12918 - RNA, 21 nt, RNAi-antisense strand
gaugagcauuauaucuccauu

SEQ ID NO: 12919 - DNA, 21 bp, Homo sapiens
aatgctcatcaccgcagctgt

SEQ ID NO: 12920 - RNA, 21 nt, RNAi-sense strand
ugcucaucaccgcagcuguuu

SEQ ID NO: 12921 - RNA, 21 nt, RNAi-antisense strand
acagcugcggugaugagcauu

SEQ ID NO: 12922 - DNA, 21 bp, Homo sapiens
aaccagtctggtcaccgtcac

SEQ ID NO: 12923 - RNA, 21 nt, RNAi-sense strand
ccagucuggucaccgucacuu

SEQ ID NO: 12924 - RNA, 21 nt, RNAi-antisense strand
gugacggugaccagacugguu

SEQ ID NO: 12925 - DNA, 21 bp, Homo sapiens
aatagctgcatacatcatacg

SEQ ID NO: 12926 - RNA, 21 nt, RNAi-sense strand
uagcugcauacaucauacguu

SEQ ID NO: 12927 - RNA, 21 nt, RNAi-antisense strand
cguaugauguaugcagcuauu

SEQ ID NO: 12928 - DNA, 21 bp, Homo sapiens
aagccagaatacaagattgct

SEQ ID NO: 12929 - RNA, 21 nt, RNAi-sense strand
gccagaauacaagauugcuuu

SEQ ID NO: 12930 - RNA, 21 nt, RNAi-antisense strand
agcaaucuuguauucuggcuu

SEQ ID NO: 12931 - DNA, 21 bp, Homo sapiens
aatactagaaggtgtgccaag

SEQ ID NO: 12932 - RNA, 21 nt, RNAi-sense strand
uacuagaaggugugccaaguu

SEQ ID NO: 12933 - RNA, 21 nt, RNAi-antisense strand
cuuggcacaccuucuaguauu

SEQ ID NO: 12934 - DNA, 21 bp, Homo sapiens
aaggtgtgccaagccatttga

SEQ ID NO: 12935 - RNA, 21 nt, RNAi-sense strand
ggugugccaagccauuugauu

SEQ ID NO: 12936 - RNA, 21 nt, RNAi-antisense strand
ucaaauggcuuggcacaccuu

SEQ ID NO: 12937 - DNA, 21 bp, Homo sapiens
aagccatttgaatgtagacta

SEQ ID NO: 12938 - RNA, 21 nt, RNAi-sense strand
gccauuugaauguagacuauu

SEQ ID NO: 12939 - RNA, 21 nt, RNAi-antisense strand
uagucuacauucaaauggcuu

SEQ ID NO: 12940 - DNA, 21 bp, Homo sapiens
aagatgtatattcagtcgaag

SEQ ID NO: 12941 - RNA, 21 nt, RNAi-sense strand
gauguauauucagucgaaguu

SEQ ID NO: 12942 - RNA, 21 nt, RNAi-antisense strand
cuucgacugaauauacaucuu

SEQ ID NO: 12943 - DNA, 21 bp, Homo sapiens
aaatatctggtctctcacttc

SEQ ID NO: 12944 - RNA, 21 nt, RNAi-sense strand
auaucuggucucucacuucuu

SEQ ID NO: 12945 - RNA, 21 nt, RNAi-antisense strand
gaagugagagaccagauauuu

SEQ ID NO: 12946 - DNA, 21 bp, Homo sapiens
aatatctggtctctcacttca

SEQ ID NO: 12947 - RNA, 21 nt, RNAi-sense strand
uaucuggucucucacuucauu

SEQ ID NO: 12948 - RNA, 21 nt, RNAi-antisense strand
ugaagugagagaccagauauu

SEQ ID NO: 12949 - DNA, 21 bp, Homo sapiens
aaatctactgccatagttcac

SEQ ID NO: 12950 - RNA, 21 nt, RNAi-sense strand
aucuacugccauaguucacuu

SEQ ID NO: 12951 - RNA, 21 nt, RNAi-antisense strand
gugaacuauggcaguagauuu

SEQ ID NO: 12952 - DNA, 21 bp, Homo sapiens
aatctactgccatagttcaca

SEQ ID NO: 12953 - RNA, 21 nt, RNAi-sense strand
ucuacugccauaguucacauu

SEQ ID NO: 12954 - RNA, 21 nt, RNAi-antisense strand
ugugaacuauggcaguagauu

SEQ ID NO: 12955 - DNA, 21 bp, Homo sapiens
aattcctggaagttcatctaa

SEQ ID NO: 12956 - RNA, 21 nt, RNAi-sense strand
uuccuggaaguucaucuaauu

SEQ ID NO: 12957 - RNA, 21 nt, RNAi-antisense strand
uuagaugaacuuccaggaauu

SEQ ID NO: 12958 - DNA, 21 bp, Homo sapiens
aagtacagtccaaagcaaacc

SEQ ID NO: 12959 - RNA, 21 nt, RNAi-sense strand
guacaguccaaagcaaaccuu

SEQ ID NO: 12960 - RNA, 21 nt, RNAi-antisense strand
gguuugcuuuggacuguacuu

SEQ ID NO: 12961 - DNA, 21 bp, Homo sapiens
aacacatttggcatgtataga

SEQ ID NO: 12962 - RNA, 21 nt, RNAi-sense strand
cacauuuggcauguauagauu

SEQ ID NO: 12963 - RNA, 21 nt, RNAi-antisense strand
ucuauacaugccaaauguguu

SEQ ID NO: 12964 - DNA, 21 bp, Homo sapiens
aagaagtggacagaacttgtg

SEQ ID NO: 12965 - RNA, 21 nt, RNAi-sense strand
gaaguggacagaacuuguguu

SEQ ID NO: 12966 - RNA, 21 nt, RNAi-antisense strand
cacaaguucuguccacuucuu

SEQ ID NO: 12967 - DNA, 21 bp, Homo sapiens
aagtggacagaacttgtgcaa

SEQ ID NO: 12968 - RNA, 21 nt, RNAi-sense strand
guggacagaacuugugcaauu

SEQ ID NO: 12969 - RNA, 21 nt, RNAi-antisense strand
uugcacaaguucuguccacuu

SEQ ID NO: 12970 - DNA, 21 bp, Homo sapiens
aacttgtgcaaattgtcagag

SEQ ID NO: 12971 - RNA, 21 nt, RNAi-sense strand
cuugugcaaauugucagaguu

SEQ ID NO: 12972 - RNA, 21 nt, RNAi-antisense strand
cucugacaauuugcacaaguu

SEQ ID NO: 12973 - DNA, 21 bp, Homo sapiens
aaattgtcagagttctagtcc

SEQ ID NO: 12974 - RNA, 21 nt, RNAi-sense strand
auugucagaguucuaguccuu

SEQ ID NO: 12975 - RNA, 21 nt, RNAi-antisense strand
ggacuagaacucugacaauuu

SEQ ID NO: 12976 - DNA, 21 bp, Homo sapiens
aactcctgccttatttatcct

SEQ ID NO: 12977 - RNA, 21 nt, RNAi-sense strand
cuccugccuuauuuauccuuu

SEQ ID NO: 12978 - RNA, 21 nt, RNAi-antisense strand
aggauaaauaaggcaggaguu

SEQ ID NO: 12979 - DNA, 21 bp, Homo sapiens
caaatctatgctaaggaagga

SEQ ID NO: 12980 - RNA, 21 nt, RNAi-sense strand
aaucuaugcuaaggaaggauu

SEQ ID NO: 12981 - RNA, 21 nt, RNAi-antisense strand
uccuuccuuagcauagauuuu

SEQ ID NO: 12982 - DNA, 21 bp, Homo sapiens
caccagcgcctttgacttctc

SEQ ID NO: 12983 - RNA, 21 nt, RNAi-sense strand
ccagcgccuuugacuucucuu

SEQ ID NO: 12984 - RNA, 21 nt, RNAi-antisense strand
gagaagucaaaggcgcugguu

SEQ ID NO: 12985 - DNA, 21 bp, Homo sapiens
cagcgcctttgacttctcgga

SEQ ID NO: 12986 - RNA, 21 nt, RNAi-sense strand
gcgccuuugacuucucggauu

SEQ ID NO: 12987 - RNA, 21 nt, RNAi-antisense strand
uccgagaagucaaaggcgcuu

SEQ ID NO: 12988 - DNA, 21 bp, Homo sapiens
caacaaacttcgagttgtggt

SEQ ID NO: 12989 - RNA, 21 nt, RNAi-sense strand
acaaacuucgaguugugguuu

SEQ ID NO: 12990 - RNA, 21 nt, RNAi-antisense strand
accacaacucgaaguuuguuu

SEQ ID NO: 12991 - DNA, 21 bp, Homo sapiens
caaacttcgagttgtggtggc

SEQ ID NO: 12992 - RNA, 21 nt, RNAi-sense strand
aacuucgaguugugguggcuu

SEQ ID NO: 12993 - RNA, 21 nt, RNAi-antisense strand
gccaccacaacucgaaguuuu

SEQ ID NO: 12994 - DNA, 21 bp, Homo sapiens
caggccgacgatgattcctta

SEQ ID NO: 12995 - RNA, 21 nt, RNAi-sense strand
ggccgacgaugauuccuuauu

SEQ ID NO: 12996 - RNA, 21 nt, RNAi-antisense strand
uaaggaaucaucgucggccuu

SEQ ID NO: 12997 - DNA, 21 bp, Homo sapiens
caagacttacctttgaccaac

SEQ ID NO: 12998 - RNA, 21 nt, RNAi-sense strand
agacuuaccuuugaccaacuu

SEQ ID NO: 12999 - RNA, 21 nt, RNAi-antisense strand
guuggucaaagguaagucuuu

SEQ ID NO: 13000 - DNA, 21 bp, Homo sapiens
caacagtcagctgagtttgaa

SEQ ID NO: 13001 - RNA, 21 nt, RNAi-sense strand
acagucagcugaguuugaauu

SEQ ID NO: 13002 - RNA, 21 nt, RNAi-antisense strand
uucaaacucagcugacuguuu

SEQ ID NO: 13003 - DNA, 21 bp, Homo sapiens
cagtcagctgagtttgaaggt

SEQ ID NO: 13004 - RNA, 21 nt, RNAi-sense strand
gucagcugaguuugaagguuu

SEQ ID NO: 13005 - RNA, 21 nt, RNAi-antisense strand
accuucaaacucagcugacuu

SEQ ID NO: 13006 - DNA, 21 bp, Homo sapiens
cagctgagtttgaaggtggac

SEQ ID NO: 13007 - RNA, 21 nt, RNAi-sense strand
gcugaguuugaagguggacuu

SEQ ID NO: 13008 - RNA, 21 nt, RNAi-antisense strand
guccaccuucaaacucagcuu

SEQ ID NO: 13009 - DNA, 21 bp, Homo sapiens
caactgcagcaaacagagaga

SEQ ID NO: 13010 - RNA, 21 nt, RNAi-sense strand
acugcagcaaacagagagauu

SEQ ID NO: 13011 - RNA, 21 nt, RNAi-antisense strand
ucucucuguuugcugcaguuu

SEQ ID NO: 13012 - DNA, 21 bp, Homo sapiens
cagcaaacagagagagatact

SEQ ID NO: 13013 - RNA, 21 nt, RNAi-sense strand
gcaaacagagagagauacuuu

SEQ ID NO: 13014 - RNA, 21 nt, RNAi-antisense strand
aguaucucucucuguuugcuu

SEQ ID NO: 13015 - DNA, 21 bp, Homo sapiens
caaacagagagagatactgaa

SEQ ID NO: 13016 - RNA, 21 nt, RNAi-sense strand
aacagagagagauacugaauu

SEQ ID NO: 13017 - RNA, 21 nt, RNAi-antisense strand
uucaguaucucucucuguuuu

SEQ ID NO: 13018 - DNA, 21 bp, Homo sapiens
cagagagagatactgaagcag

SEQ ID NO: 13019 - RNA, 21 nt, RNAi-sense strand
gagagagauacugaagcaguu

SEQ ID NO: 13020 - RNA, 21 nt, RNAi-antisense strand
cugcuucaguaucucucucuu

SEQ ID NO: 13021 - DNA, 21 bp, Homo sapiens
cagagaaaggtgaaagccagg

SEQ ID NO: 13022 - RNA, 21 nt, RNAi-sense strand
gagaaaggugaaagccagguu

SEQ ID NO: 13023 - RNA, 21 nt, RNAi-antisense strand
ccuggcuuucaccuuucucuu

SEQ ID NO: 13024 - DNA, 21 bp, Homo sapiens
caggttgaccattgctgccgt

SEQ ID NO: 13025 - RNA, 21 nt, RNAi-sense strand
gguugaccauugcugccguuu

SEQ ID NO: 13026 - RNA, 21 nt, RNAi-antisense strand
acggcagcaauggucaaccuu

SEQ ID NO: 13027 - DNA, 21 bp, Homo sapiens
cattgctgccgttctgtactt

SEQ ID NO: 13028 - RNA, 21 nt, RNAi-sense strand
uugcugccguucuguacuuuu

SEQ ID NO: 13029 - RNA, 21 nt, RNAi-antisense strand
aaguacagaacggcagcaauu

SEQ ID NO: 13030 - DNA, 21 bp, Homo sapiens
catgattggagaacttgtagg

SEQ ID NO: 13031 - RNA, 21 nt, RNAi-sense strand
ugauuggagaacuuguagguu

SEQ ID NO: 13032 - RNA, 21 nt, RNAi-antisense strand
ccuacaaguucuccaaucauu

SEQ ID NO: 13033 - DNA, 21 bp, Homo sapiens
cattgcaaatagcctagcaat

SEQ ID NO: 13034 - RNA, 21 nt, RNAi-sense strand
uugcaaauagccuagcaauuu

SEQ ID NO: 13035 - RNA, 21 nt, RNAi-antisense strand
auugcuaggcuauuugcaauu

SEQ ID NO: 13036 - DNA, 21 bp, Homo sapiens
caaatagcctagcaatcatga

SEQ ID NO: 13037 - RNA, 21 nt, RNAi-sense strand
aauagccuagcaaucaugauu

SEQ ID NO: 13038 - RNA, 21 nt, RNAi-antisense strand
ucaugauugcuaggcuauuuu

SEQ ID NO: 13039 - DNA, 21 bp, Homo sapiens
caatcatgacagatgcacttc

SEQ ID NO: 13040 - RNA, 21 nt, RNAi-sense strand
aucaugacagaugcacuucuu

SEQ ID NO: 13041 - RNA, 21 nt, RNAi-antisense strand
gaagugcaucugucaugauuu

SEQ ID NO: 13042 - DNA, 21 bp, Homo sapiens
catgacagatgcacttcatat

SEQ ID NO: 13043 - RNA, 21 nt, RNAi-sense strand
ugacagaugcacuucauauuu

SEQ ID NO: 13044 - RNA, 21 nt, RNAi-antisense strand
auaugaagugcaucugucauu

SEQ ID NO: 13045 - DNA, 21 bp, Homo sapiens
cagatgcacttcatatgttaa

SEQ ID NO: 13046 - RNA, 21 nt, RNAi-sense strand
gaugcacuucauauguuaauu

SEQ ID NO: 13047 - RNA, 21 nt, RNAi-antisense strand
uuaacauaugaagugcaucuu

SEQ ID NO: 13048 - DNA, 21 bp, Homo sapiens
cacttcatatgttaactgacc

SEQ ID NO: 13049 - RNA, 21 nt, RNAi-sense strand
cuucauauguuaacugaccuu

SEQ ID NO: 13050 - RNA, 21 nt, RNAi-antisense strand
ggucaguuaacauaugaaguu

SEQ ID NO: 13051 - DNA, 21 bp, Homo sapiens
catatgttaactgacctaagc

SEQ ID NO: 13052 - RNA, 21 nt, RNAi-sense strand
uauguuaacugaccuaagcuu

SEQ ID NO: 13053 - RNA, 21 nt, RNAi-antisense strand
gcuuaggucaguuaacauauu

SEQ ID NO: 13054 - DNA, 21 bp, Homo sapiens
cacctttggatttcatcgctt

SEQ ID NO: 13055 - RNA, 21 nt, RNAi-sense strand
ccuuuggauuucaucgcuuuu

SEQ ID NO: 13056 - RNA, 21 nt, RNAi-antisense strand
aagcgaugaaauccaaagguu

SEQ ID NO: 13057 - DNA, 21 bp, Homo sapiens
cagctatgattagtgtgctgt

SEQ ID NO: 13058 - RNA, 21 nt, RNAi-sense strand
gcuaugauuagugugcuguuu

SEQ ID NO: 13059 - RNA, 21 nt, RNAi-antisense strand
acagcacacuaaucauagcuu

SEQ ID NO: 13060 - DNA, 21 bp, Homo sapiens
caaagaactatccatatgaac

SEQ ID NO: 13061 - RNA, 21 nt, RNAi-sense strand
aagaacuauccauaugaacuu

SEQ ID NO: 13062 - RNA, 21 nt, RNAi-antisense strand
guucauauggauaguucuuuu

SEQ ID NO: 13063 - DNA, 21 bp, Homo sapiens
catcaccgcagctgttggagt

SEQ ID NO: 13064 - RNA, 21 nt, RNAi-sense strand
ucaccgcagcuguuggaguuu

SEQ ID NO: 13065 - RNA, 21 nt, RNAi-antisense strand
acuccaacagcugcggugauu

SEQ ID NO: 13066 - DNA, 21 bp, Homo sapiens
caccgcagctgttggagttgc

SEQ ID NO: 13067 - RNA, 21 nt, RNAi-sense strand
ccgcagcuguuggaguugcuu

SEQ ID NO: 13068 - RNA, 21 nt, RNAi-antisense strand
gcaacuccaacagcugcgguu

SEQ ID NO: 13069 - DNA, 21 bp, Homo sapiens
cagctgttggagttgcagtta

SEQ ID NO: 13070 - RNA, 21 nt, RNAi-sense strand
gcuguuggaguugcaguuauu

SEQ ID NO: 13071 - RNA, 21 nt, RNAi-antisense strand
uaacugcaacuccaacagcuu

SEQ ID NO: 13072 - DNA, 21 bp, Homo sapiens
cagtctggtcaccgtcactcc

SEQ ID NO: 13073 - RNA, 21 nt, RNAi-sense strand
gucuggucaccgucacuccuu

SEQ ID NO: 13074 - RNA, 21 nt, RNAi-antisense strand
ggagugacggugaccagacuu

SEQ ID NO: 13075 - DNA, 21 bp, Homo sapiens
caggatagcctggcagtgaga

SEQ ID NO: 13076 - RNA, 21 nt, RNAi-sense strand
ggauagccuggcagugagauu

SEQ ID NO: 13077 - RNA, 21 nt, RNAi-antisense strand
ucucacugccaggcuauccuu

SEQ ID NO: 13078 - DNA, 21 bp, Homo sapiens
cagtgagagctgcatttgtac

SEQ ID NO: 13079 - RNA, 21 nt, RNAi-sense strand
gugagagcugcauuuguacuu

SEQ ID NO: 13080 - RNA, 21 nt, RNAi-antisense strand
guacaaaugcagcucucacuu

SEQ ID NO: 13081 - DNA, 21 bp, Homo sapiens
cagagtgttggtgtgctaata

SEQ ID NO: 13082 - RNA, 21 nt, RNAi-sense strand
gaguguuggugugcuaauauu

SEQ ID NO: 13083 - RNA, 21 nt, RNAi-antisense strand
uauuagcacaccaacacucuu

SEQ ID NO: 13084 - DNA, 21 bp, Homo sapiens
catacatcatacgattcaagc

SEQ ID NO: 13085 - RNA, 21 nt, RNAi-sense strand
uacaucauacgauucaagcuu

SEQ ID NO: 13086 - RNA, 21 nt, RNAi-antisense strand
gcuugaaucguaugauguauu

SEQ ID NO: 13087 - DNA, 21 bp, Homo sapiens
catcatacgattcaagccaga

SEQ ID NO: 13088 - RNA, 21 nt, RNAi-sense strand
ucauacgauucaagccagauu

SEQ ID NO: 13089 - RNA, 21 nt, RNAi-antisense strand
ucuggcuugaaucguaugauu

SEQ ID NO: 13090 - DNA, 21 bp, Homo sapiens
catacgattcaagccagaata

SEQ ID NO: 13091 - RNA, 21 nt, RNAi-sense strand
uacgauucaagccagaauauu

SEQ ID NO: 13092 - RNA, 21 nt, RNAi-antisense strand
uauucuggcuugaaucguauu

SEQ ID NO: 13093 - DNA, 21 bp, Homo sapiens
caagccagaatacaagattgc

SEQ ID NO: 13094 - RNA, 21 nt, RNAi-sense strand
agccagaauacaagauugcuu

SEQ ID NO: 13095 - RNA, 21 nt, RNAi-antisense strand
gcaaucuuguauucuggcuuu

SEQ ID NO: 13096 - DNA, 21 bp, Homo sapiens
cagaatacaagattgctgacc

SEQ ID NO: 13097 - RNA, 21 nt, RNAi-sense strand
gaauacaagauugcugaccuu

SEQ ID NO: 13098 - RNA, 21 nt, RNAi-antisense strand
ggucagcaaucuuguauucuu

SEQ ID NO: 13099 - DNA, 21 bp, Homo sapiens
caagccatttgaatgtagact

SEQ ID NO: 13100 - RNA, 21 nt, RNAi-sense strand
agccauuugaauguagacuuu

SEQ ID NO: 13101 - RNA, 21 nt, RNAi-antisense strand
agucuacauucaaauggcuuu

SEQ ID NO: 13102 - DNA, 21 bp, Homo sapiens
catagttcacatacagctaat

SEQ ID NO: 13103 - RNA, 21 nt, RNAi-sense strand
uaguucacauacagcuaauuu

SEQ ID NO: 13104 - RNA, 21 nt, RNAi-antisense strand
auuagcuguaugugaacuauu

SEQ ID NO: 13105 - DNA, 21 bp, Homo sapiens
cacatacagctaattcctgga

SEQ ID NO: 13106 - RNA, 21 nt, RNAi-sense strand
cauacagcuaauuccuggauu

SEQ ID NO: 13107 - RNA, 21 nt, RNAi-antisense strand
uccaggaauuagcuguauguu

SEQ ID NO: 13108 - DNA, 21 bp, Homo sapiens
catacagctaattcctggaag

SEQ ID NO: 13109 - RNA, 21 nt, RNAi-sense strand
uacagcuaauuccuggaaguu

SEQ ID NO: 13110 - RNA, 21 nt, RNAi-antisense strand
cuuccaggaauuagcuguauu

SEQ ID NO: 13111 - DNA, 21 bp, Homo sapiens
cagctaattcctggaagttca

SEQ ID NO: 13112 - RNA, 21 nt, RNAi-sense strand
gcuaauuccuggaaguucauu

SEQ ID NO: 13113 - RNA, 21 nt, RNAi-antisense strand
ugaacuuccaggaauuagcuu

SEQ ID NO: 13114 - DNA, 21 bp, Homo sapiens
cagtccaaagcaaaccattta

SEQ ID NO: 13115 - RNA, 21 nt, RNAi-sense strand
guccaaagcaaaccauuuauu

SEQ ID NO: 13116 - RNA, 21 nt, RNAi-antisense strand
uaaaugguuugcuuuggacuu

SEQ ID NO: 13117 - DNA, 21 bp, Homo sapiens
cacatttggcatgtatagatg

SEQ ID NO: 13118 - RNA, 21 nt, RNAi-sense strand
cauuuggcauguauagauguu

SEQ ID NO: 13119 - RNA, 21 nt, RNAi-antisense strand
caucuauacaugccaaauguu

SEQ ID NO: 13120 - DNA, 21 bp, Homo sapiens
catttggcatgtatagatgta

SEQ ID NO: 13121 - RNA, 21 nt, RNAi-sense strand
uuuggcauguauagauguauu

SEQ ID NO: 13122 - RNA, 21 nt, RNAi-antisense strand
uacaucuauacaugccaaauu

SEQ ID NO: 13123 - DNA, 21 bp, Homo sapiens
cagcttcagagttacaggcaa

SEQ ID NO: 13124 - RNA, 21 nt, RNAi-sense strand
gcuucagaguuacaggcaauu

SEQ ID NO: 13125 - RNA, 21 nt, RNAi-antisense strand
uugccuguaacucugaagcuu

SEQ ID NO: 13126 - DNA, 21 bp, Homo sapiens
cagagttacaggcaagaagtg

SEQ ID NO: 13127 - RNA, 21 nt, RNAi-sense strand
gaguuacaggcaagaaguguu

SEQ ID NO: 13128 - RNA, 21 nt, RNAi-antisense strand
cacuucuugccuguaacucuu

SEQ ID NO: 13129 - DNA, 21 bp, Homo sapiens
caggcaagaagtggacagaac

SEQ ID NO: 13130 - RNA, 21 nt, RNAi-sense strand
ggcaagaaguggacagaacuu

SEQ ID NO: 13131 - RNA, 21 nt, RNAi-antisense strand
guucuguccacuucuugccuu

SEQ ID NO: 13132 - DNA, 21 bp, Homo sapiens
caagaagtggacagaacttgt

SEQ ID NO: 13133 - RNA, 21 nt, RNAi-sense strand
agaaguggacagaacuuguuu

SEQ ID NO: 13134 - RNA, 21 nt, RNAi-antisense strand
acaaguucuguccacuucuuu

SEQ ID NO: 13135 - DNA, 21 bp, Homo sapiens
cagaacttgtgcaaattgtca

SEQ ID NO: 13136 - RNA, 21 nt, RNAi-sense strand
gaacuugugcaaauugucauu

SEQ ID NO: 13137 - RNA, 21 nt, RNAi-antisense strand
ugacaauuugcacaaguucuu

SEQ ID NO: 13138 - DNA, 21 bp, Homo sapiens
caaattgtcagagttctagtc

SEQ ID NO: 13139 - RNA, 21 nt, RNAi-sense strand
aauugucagaguucuagucuu

SEQ ID NO: 13140 - RNA, 21 nt, RNAi-antisense strand
gacuagaacucugacaauuuu

SEQ ID NO: 13141 - DNA, 21 bp, Homo sapiens
cagtcacagacttgagagcaa

SEQ ID NO: 13142 - RNA, 21 nt, RNAi-sense strand
gucacagacuugagagcaauu

SEQ ID NO: 13143 - RNA, 21 nt, RNAi-antisense strand
uugcucucaagucugugacuu

SEQ ID NO: 13144 - DNA, 21 bp, Homo sapiens
cacagacttgagagcaataaa

SEQ ID NO: 13145 - RNA, 21 nt, RNAi-sense strand
cagacuugagagcaauaaauu

SEQ ID NO: 13146 - RNA, 21 nt, RNAi-antisense strand
uuuauugcucucaagucuguu

SEQ ID NO: 13147 - DNA, 21 bp, Homo sapiens
cagacttgagagcaataaatg

SEQ ID NO: 13148 - RNA, 21 nt, RNAi-sense strand
gacuugagagcaauaaauguu

SEQ ID NO: 13149 - RNA, 21 nt, RNAi-antisense strand
cauuuauugcucucaagucuu

SEQ ID NO: 13150 - DNA, 21 bp, Homo sapiens
gagaactggcgctccggtgaa

SEQ ID NO: 13151 - RNA, 21 nt, RNAi-sense strand
gaacuggcgcuccggugaauu

SEQ ID NO: 13152 - RNA, 21 nt, RNAi-antisense strand
uucaccggagcgccaguucuu

SEQ ID NO: 13153 - DNA, 21 bp, Homo sapiens
gaactggcgctccggtgaagt

SEQ ID NO: 13154 - RNA, 21 nt, RNAi-sense strand
acuggcgcuccggugaaguuu

SEQ ID NO: 13155 - RNA, 21 nt, RNAi-antisense strand
acuucaccggagcgccaguuu

SEQ ID NO: 13156 - DNA, 21 bp, Homo sapiens
gaagcgcctcaaatctatgct

SEQ ID NO: 13157 - RNA, 21 nt, RNAi-sense strand
agcgccucaaaucuaugcuuu

SEQ ID NO: 13158 - RNA, 21 nt, RNAi-antisense strand
agcauagauuugaggcgcuuu

SEQ ID NO: 13159 - DNA, 21 bp, Homo sapiens
gacaccagcgcctttgacttc

SEQ ID NO: 13160 - RNA, 21 nt, RNAi-sense strand
caccagcgccuuugacuucuu

SEQ ID NO: 13161 - RNA, 21 nt, RNAi-antisense strand
gaagucaaaggcgcugguguu

SEQ ID NO: 13162 - DNA, 21 bp, Homo sapiens
gagttgtggtggccgatgacg

SEQ ID NO: 13163 - RNA, 21 nt, RNAi-sense strand
guugugguggccgaugacguu

SEQ ID NO: 13164 - RNA, 21 nt, RNAi-antisense strand
cgucaucggccaccacaacuu

SEQ ID NO: 13165 - DNA, 21 bp, Homo sapiens
gacgatgattccttactggac

SEQ ID NO: 13166 - RNA, 21 nt, RNAi-sense strand
cgaugauuccuuacuggacuu

SEQ ID NO: 13167 - RNA, 21 nt, RNAi-antisense strand
guccaguaaggaaucaucguu

SEQ ID NO: 13168 - DNA, 21 bp, Homo sapiens
gatgattccttactggaccaa

SEQ ID NO: 13169 - RNA, 21 nt, RNAi-sense strand
ugauuccuuacuggaccaauu

SEQ ID NO: 13170 - RNA, 21 nt, RNAi-antisense strand
uugguccaguaaggaaucauu

SEQ ID NO: 13171 - DNA, 21 bp, Homo sapiens
gattccttactggaccaagac

SEQ ID NO: 13172 - RNA, 21 nt, RNAi-sense strand
uuccuuacuggaccaagacuu

SEQ ID NO: 13173 - RNA, 21 nt, RNAi-antisense strand
gucuugguccaguaaggaauu

SEQ ID NO: 13174 - DNA, 21 bp, Homo sapiens
gaccaagacttacctttgacc

SEQ ID NO: 13175 - RNA, 21 nt, RNAi-sense strand
ccaagacuuaccuuugaccuu

SEQ ID NO: 13176 - RNA, 21 nt, RNAi-antisense strand
ggucaaagguaagucuugguu

SEQ ID NO: 13177 - DNA, 21 bp, Homo sapiens
gacttacctttgaccaacagt

SEQ ID NO: 13178 - RNA, 21 nt, RNAi-sense strand
cuuaccuuugaccaacaguuu

SEQ ID NO: 13179 - RNA, 21 nt, RNAi-antisense strand
acuguuggucaaagguaaguu

SEQ ID NO: 13180 - DNA, 21 bp, Homo sapiens
gaccaacagtcagctgagttt

SEQ ID NO: 13181 - RNA, 21 nt, RNAi-sense strand
ccaacagucagcugaguuuuu

SEQ ID NO: 13182 - RNA, 21 nt, RNAi-antisense strand
aaacucagcugacuguugguu

SEQ ID NO: 13183 - DNA, 21 bp, Homo sapiens
gagtttgaaggtggactcctg

SEQ ID NO: 13184 - RNA, 21 nt, RNAi-sense strand
guuugaagguggacuccuguu

SEQ ID NO: 13185 - RNA, 21 nt, RNAi-antisense strand
caggaguccaccuucaaacuu

SEQ ID NO: 13186 - DNA, 21 bp, Homo sapiens
gaaggtggactcctgtgacaa

SEQ ID NO: 13187 - RNA, 21 nt, RNAi-sense strand
agguggacuccugugacaauu

SEQ ID NO: 13188 - RNA, 21 nt, RNAi-antisense strand
uugucacaggaguccaccuuu

SEQ ID NO: 13189 - DNA, 21 bp, Homo sapiens
gactcctgtgacaactgcagc

SEQ ID NO: 13190 - RNA, 21 nt, RNAi-sense strand
cuccugugacaacugcagcuu

SEQ ID NO: 13191 - RNA, 21 nt, RNAi-antisense strand
gcugcaguugucacaggaguu

SEQ ID NO: 13192 - DNA, 21 bp, Homo sapiens
gacaactgcagcaaacagaga

SEQ ID NO: 13193 - RNA, 21 nt, RNAi-sense strand
caacugcagcaaacagagauu

SEQ ID NO: 13194 - RNA, 21 nt, RNAi-antisense strand
ucucuguuugcugcaguuguu

SEQ ID NO: 13195 - DNA, 21 bp, Homo sapiens
gagagagatactgaagcagag

SEQ ID NO: 13196 - RNA, 21 nt, RNAi-sense strand
gagagauacugaagcagaguu

SEQ ID NO: 13197 - RNA, 21 nt, RNAi-antisense strand
cucugcuucaguaucucucuu

SEQ ID NO: 13198 - DNA, 21 bp, Homo sapiens
gagagatactgaagcagagaa

SEQ ID NO: 13199 - RNA, 21 nt, RNAi-sense strand
gagauacugaagcagagaauu

SEQ ID NO: 13200 - RNA, 21 nt, RNAi-antisense strand
uucucugcuucaguaucucuu

SEQ ID NO: 13201 - DNA, 21 bp, Homo sapiens
gagatactgaagcagagaaag

SEQ ID NO: 13202 - RNA, 21 nt, RNAi-sense strand
gauacugaagcagagaaaguu

SEQ ID NO: 13203 - RNA, 21 nt, RNAi-antisense strand
cuuucucugcuucaguaucuu

SEQ ID NO: 13204 - DNA, 21 bp, Homo sapiens
gatactgaagcagagaaaggt

SEQ ID NO: 13205 - RNA, 21 nt, RNAi-sense strand
uacugaagcagagaaagguuu

SEQ ID NO: 13206 - RNA, 21 nt, RNAi-antisense strand
accuuucucugcuucaguauu

SEQ ID NO: 13207 - DNA, 21 bp, Homo sapiens
gaagcagagaaaggtgaaagc

SEQ ID NO: 13208 - RNA, 21 nt, RNAi-sense strand
agcagagaaaggugaaagcuu

SEQ ID NO: 13209 - RNA, 21 nt, RNAi-antisense strand
gcuuucaccuuucucugcuuu

SEQ ID NO: 13210 - DNA, 21 bp, Homo sapiens
gagaaaggtgaaagccaggtt

SEQ ID NO: 13211 - RNA, 21 nt, RNAi-sense strand
gaaaggugaaagccagguuuu

SEQ ID NO: 13212 - RNA, 21 nt, RNAi-antisense strand
aaccuggcuuucaccuuucuu

SEQ ID NO: 13213 - DNA, 21 bp, Homo sapiens
gaaaggtgaaagccaggttga

SEQ ID NO: 13214 - RNA, 21 nt, RNAi-sense strand
aaggugaaagccagguugauu

SEQ ID NO: 13215 - RNA, 21 nt, RNAi-antisense strand
ucaaccuggcuuucaccuuuu

SEQ ID NO: 13216 - DNA, 21 bp, Homo sapiens
gaaagccaggttgaccattgc

SEQ ID NO: 13217 - RNA, 21 nt, RNAi-sense strand
aagccagguugaccauugcuu

SEQ ID NO: 13218 - RNA, 21 nt, RNAi-antisense strand
gcaauggucaaccuggcuuuu

SEQ ID NO: 13219 - DNA, 21 bp, Homo sapiens
gaccattgctgccgttctgta

SEQ ID NO: 13220 - RNA, 21 nt, RNAi-sense strand
ccauugcugccguucuguauu

SEQ ID NO: 13221 - RNA, 21 nt, RNAi-antisense strand
uacagaacggcagcaaugguu

SEQ ID NO: 13222 - DNA, 21 bp, Homo sapiens
gattggagaacttgtaggtgg

SEQ ID NO: 13223 - RNA, 21 nt, RNAi-sense strand
uuggagaacuuguaggugguu

SEQ ID NO: 13224 - RNA, 21 nt, RNAi-antisense strand
ccaccuacaaguucuccaauu

SEQ ID NO: 13225 - DNA, 21 bp, Homo sapiens
gagaacttgtaggtggataca

SEQ ID NO: 13226 - RNA, 21 nt, RNAi-sense strand
gaacuuguagguggauacauu

SEQ ID NO: 13227 - RNA, 21 nt, RNAi-antisense strand
uguauccaccuacaaguucuu

SEQ ID NO: 13228 - DNA, 21 bp, Homo sapiens
gaacttgtaggtggatacatt

SEQ ID NO: 13229 - RNA, 21 nt, RNAi-sense strand
acuuguagguggauacauuuu

SEQ ID NO: 13230 - RNA, 21 nt, RNAi-antisense strand
aauguauccaccuacaaguuu

SEQ ID NO: 13231 - DNA, 21 bp, Homo sapiens
gatacattgcaaatagcctag

SEQ ID NO: 13232 - RNA, 21 nt, RNAi-sense strand
uacauugcaaauagccuaguu

SEQ ID NO: 13233 - RNA, 21 nt, RNAi-antisense strand
cuaggcuauuugcaauguauu

SEQ ID NO: 13234 - DNA, 21 bp, Homo sapiens
gacagatgcacttcatatgtt

SEQ ID NO: 13235 - RNA, 21 nt, RNAi-sense strand
cagaugcacuucauauguuuu

SEQ ID NO: 13236 - RNA, 21 nt, RNAi-antisense strand
aacauaugaagugcaucuguu

SEQ ID NO: 13237 - DNA, 21 bp, Homo sapiens
gatgcacttcatatgttaact

SEQ ID NO: 13238 - RNA, 21 nt, RNAi-sense strand
ugcacuucauauguuaacuuu

SEQ ID NO: 13239 - RNA, 21 nt, RNAi-antisense strand
aguuaacauaugaagugcauu

SEQ ID NO: 13240 - DNA, 21 bp, Homo sapiens
gacctaagcgccatcatactc

SEQ ID NO: 13241 - RNA, 21 nt, RNAi-sense strand
ccuaagcgccaucauacucuu

SEQ ID NO: 13242 - RNA, 21 nt, RNAi-antisense strand
gaguaugauggcgcuuagguu

SEQ ID NO: 13243 - DNA, 21 bp, Homo sapiens
gattcacctttggatttcatc

SEQ ID NO: 13244 - RNA, 21 nt, RNAi-sense strand
uucaccuuuggauuucaucuu

SEQ ID NO: 13245 - RNA, 21 nt, RNAi-antisense strand
gaugaaauccaaaggugaauu

SEQ ID NO: 13246 - DNA, 21 bp, Homo sapiens
gatttcatcgcttagaggttt

SEQ ID NO: 13247 - RNA, 21 nt, RNAi-sense strand
uuucaucgcuuagagguuuuu

SEQ ID NO: 13248 - RNA, 21 nt, RNAi-antisense strand
aaaccucuaagcgaugaaauu

SEQ ID NO: 13249 - DNA, 21 bp, Homo sapiens
gattagtgtgctgttggtgta

SEQ ID NO: 13250 - RNA, 21 nt, RNAi-sense strand
uuagugugcuguugguguauu

SEQ ID NO: 13251 - RNA, 21 nt, RNAi-antisense strand
uacaccaacagcacacuaauu

SEQ ID NO: 13252 - DNA, 21 bp, Homo sapiens
gattcctcttatatgaagctg

SEQ ID NO: 13253 - RNA, 21 nt, RNAi-sense strand
uuccucuuauaugaagcuguu

SEQ ID NO: 13254 - RNA, 21 nt, RNAi-antisense strand
cagcuucauauaagaggaauu

SEQ ID NO: 13255 - DNA, 21 bp, Homo sapiens
gaagctgtgcaaagaactatc

SEQ ID NO: 13256 - RNA, 21 nt, RNAi-sense strand
agcugugcaaagaacuaucuu

SEQ ID NO: 13257 - RNA, 21 nt, RNAi-antisense strand
gauaguucuuugcacagcuuu

SEQ ID NO: 13258 - DNA, 21 bp, Homo sapiens
gaactatccatatgaactatg

SEQ ID NO: 13259 - RNA, 21 nt, RNAi-sense strand
acuauccauaugaacuauguu

SEQ ID NO: 13260 - RNA, 21 nt, RNAi-antisense strand
cauaguucauauggauaguuu

SEQ ID NO: 13261 - DNA, 21 bp, Homo sapiens
gagatataatgctcatcaccg

SEQ ID NO: 13262 - RNA, 21 nt, RNAi-sense strand
gauauaaugcucaucaccguu

SEQ ID NO: 13263 - RNA, 21 nt, RNAi-antisense strand
cggugaugagcauuauaucuu

SEQ ID NO: 13264 - DNA, 21 bp, Homo sapiens
gatataatgctcatcaccgca

SEQ ID NO: 13265 - RNA, 21 nt, RNAi-sense strand
uauaaugcucaucaccgcauu

SEQ ID NO: 13266 - RNA, 21 nt, RNAi-antisense strand
ugcggugaugagcauuauauu

SEQ ID NO: 13267 - DNA, 21 bp, Homo sapiens
gaaccagtctggtcaccgtca

SEQ ID NO: 13268 - RNA, 21 nt, RNAi-sense strand
accagucuggucaccgucauu

SEQ ID NO: 13269 - RNA, 21 nt, RNAi-antisense strand
ugacggugaccagacugguuu

SEQ ID NO: 13270 - DNA, 21 bp, Homo sapiens
gatagcctggcagtgagagct

SEQ ID NO: 13271 - RNA, 21 nt, RNAi-sense strand
uagccuggcagugagagcuuu

SEQ ID NO: 13272 - RNA, 21 nt, RNAi-antisense strand
agcucucacugccaggcuauu

SEQ ID NO: 13273 - DNA, 21 bp, Homo sapiens
gagagctgcatttgtacatgc

SEQ ID NO: 13274 - RNA, 21 nt, RNAi-sense strand
gagcugcauuuguacaugcuu

SEQ ID NO: 13275 - RNA, 21 nt, RNAi-antisense strand
gcauguacaaaugcagcucuu

SEQ ID NO: 13276 - DNA, 21 bp, Homo sapiens
gagctgcatttgtacatgctt

SEQ ID NO: 13277 - RNA, 21 nt, RNAi-sense strand
gcugcauuuguacaugcuuuu

SEQ ID NO: 13278 - RNA, 21 nt, RNAi-antisense strand
aagcauguacaaaugcagcuu

SEQ ID NO: 13279 - DNA, 21 bp, Homo sapiens
gagatttggtacagagtgttg

SEQ ID NO: 13280 - RNA, 21 nt, RNAi-sense strand
gauuugguacagaguguuguu

SEQ ID NO: 13281 - RNA, 21 nt, RNAi-antisense strand
caacacucuguaccaaaucuu

SEQ ID NO: 13282 - DNA, 21 bp, Homo sapiens
gatttggtacagagtgttggt

SEQ ID NO: 13283 - RNA, 21 nt, RNAi-sense strand
uuugguacagaguguugguuu

SEQ ID NO: 13284 - RNA, 21 nt, RNAi-antisense strand
accaacacucuguaccaaauu

SEQ ID NO: 13285 - DNA, 21 bp, Homo sapiens
gagtgttggtgtgctaatagc

SEQ ID NO: 13286 - RNA, 21 nt, RNAi-sense strand
guguuggugugcuaauagcuu

SEQ ID NO: 13287 - RNA, 21 nt, RNAi-antisense strand
gcuauuagcacaccaacacuu

SEQ ID NO: 13288 - DNA, 21 bp, Homo sapiens
gattcaagccagaatacaaga

SEQ ID NO: 13289 - RNA, 21 nt, RNAi-sense strand
uucaagccagaauacaagauu

SEQ ID NO: 13290 - RNA, 21 nt, RNAi-antisense strand
ucuuguauucuggcuugaauu

SEQ ID NO: 13291 - DNA, 21 bp, Homo sapiens
gaaggtgtgccaagccatttg

SEQ ID NO: 13292 - RNA, 21 nt, RNAi-sense strand
aggugugccaagccauuuguu

SEQ ID NO: 13293 - RNA, 21 nt, RNAi-antisense strand
caaauggcuuggcacaccuuu

SEQ ID NO: 13294 - DNA, 21 bp, Homo sapiens
gactatatcaaagaagccttg

SEQ ID NO: 13295 - RNA, 21 nt, RNAi-sense strand
cuauaucaaagaagccuuguu

SEQ ID NO: 13296 - RNA, 21 nt, RNAi-antisense strand
caaggcuucuuugauauaguu

SEQ ID NO: 13297 - DNA, 21 bp, Homo sapiens
gaagatgtatattcagtcgaa

SEQ ID NO: 13298 - RNA, 21 nt, RNAi-sense strand
agauguauauucagucgaauu

SEQ ID NO: 13299 - RNA, 21 nt, RNAi-antisense strand
uucgacugaauauacaucuuu

SEQ ID NO: 13300 - DNA, 21 bp, Homo sapiens
gatgtatattcagtcgaagat

SEQ ID NO: 13301 - RNA, 21 nt, RNAi-sense strand
uguauauucagucgaagauuu

SEQ ID NO: 13302 - RNA, 21 nt, RNAi-antisense strand
aucuucgacugaauauacauu

SEQ ID NO: 13303 - DNA, 21 bp, Homo sapiens
gatttaaatatctggtctctc

SEQ ID NO: 13304 - RNA, 21 nt, RNAi-sense strand
uuuaaauaucuggucucucuu

SEQ ID NO: 13305 - RNA, 21 nt, RNAi-antisense strand
gagagaccagauauuuaaauu

SEQ ID NO: 13306 - DNA, 21 bp, Homo sapiens
gaggaagtacagtccaaagca

SEQ ID NO: 13307 - RNA, 21 nt, RNAi-sense strand
ggaaguacaguccaaagcauu

SEQ ID NO: 13308 - RNA, 21 nt, RNAi-antisense strand
ugcuuuggacuguacuuccuu

SEQ ID NO: 13309 - DNA, 21 bp, Homo sapiens
gaagtacagtccaaagcaaac

SEQ ID NO: 13310 - RNA, 21 nt, RNAi-sense strand
aguacaguccaaagcaaacuu

SEQ ID NO: 13311 - RNA, 21 nt, RNAi-antisense strand
guuugcuuuggacuguacuuu

SEQ ID NO: 13312 - DNA, 21 bp, Homo sapiens
gaacacatttggcatgtatag

SEQ ID NO: 13313 - RNA, 21 nt, RNAi-sense strand
acacauuuggcauguauaguu

SEQ ID NO: 13314 - RNA, 21 nt, RNAi-antisense strand
cuauacaugccaaauguguuu

SEQ ID NO: 13315 - DNA, 21 bp, Homo sapiens
gatgtactattcagcttcaga

SEQ ID NO: 13316 - RNA, 21 nt, RNAi-sense strand
uguacuauucagcuucagauu

SEQ ID NO: 13317 - RNA, 21 nt, RNAi-antisense strand
ucugaagcugaauaguacauu

SEQ ID NO: 13318 - DNA, 21 bp, Homo sapiens
gagttacaggcaagaagtgga

SEQ ID NO: 13319 - RNA, 21 nt, RNAi-sense strand
guuacaggcaagaaguggauu

SEQ ID NO: 13320 - RNA, 21 nt, RNAi-antisense strand
uccacuucuugccuguaacuu

SEQ ID NO: 13321 - DNA, 21 bp, Homo sapiens
gaagtggacagaacttgtgca

SEQ ID NO: 13322 - RNA, 21 nt, RNAi-sense strand
aguggacagaacuugugcauu

SEQ ID NO: 13323 - RNA, 21 nt, RNAi-antisense strand
ugcacaaguucuguccacuuu

SEQ ID NO: 13324 - DNA, 21 bp, Homo sapiens
gacagaacttgtgcaaattgt

SEQ ID NO: 13325 - RNA, 21 nt, RNAi-sense strand
cagaacuugugcaaauuguuu

SEQ ID NO: 13326 - RNA, 21 nt, RNAi-antisense strand
acaauuugcacaaguucuguu

SEQ ID NO: 13327 - DNA, 21 bp, Homo sapiens
gaacttgtgcaaattgtcaga

SEQ ID NO: 13328 - RNA, 21 nt, RNAi-sense strand
acuugugcaaauugucagauu

SEQ ID NO: 13329 - RNA, 21 nt, RNAi-antisense strand
ucugacaauuugcacaaguuu

SEQ ID NO: 13330 - DNA, 21 bp, Homo sapiens
gaactcctgccttatttatcc

SEQ ID NO: 13331 - RNA, 21 nt, RNAi-sense strand
acuccugccuuauuuauccuu

SEQ ID NO: 13332 - RNA, 21 nt, RNAi-antisense strand
ggauaaauaaggcaggaguuu

SEQ ID NO: 13333 - DNA, 21 bp, Homo sapiens
gacttgagagcaataaatgca

SEQ ID NO: 13334 - RNA, 21 nt, RNAi-sense strand
cuugagagcaauaaaugcauu

SEQ ID NO: 13335 - RNA, 21 nt, RNAi-antisense strand
ugcauuuauugcucucaaguu

SEQ ID NO: 13336 - DNA, 21 bp, Homo sapiens
gagagcaataaatgcaaacct

SEQ ID NO: 13337 - RNA, 21 nt, RNAi-sense strand
gagcaauaaaugcaaaccuuu

SEQ ID NO: 13338 - RNA, 21 nt, RNAi-antisense strand
agguuugcauuuauugcucuu

SEQ ID NO: 13339 - DNA, 21 bp, Homo sapiens
gagcaataaatgcaaacctaa

SEQ ID NO: 13340 - RNA, 21 nt, RNAi-sense strand
gcaauaaaugcaaaccuaauu

SEQ ID NO: 13341 - RNA, 21 nt, RNAi-antisense strand
uuagguuugcauuuauugcuu

SEQ ID NO: 13342 - DNA, 21 bp, Homo sapiens
tatgctaaggaaggatgatgc

SEQ ID NO: 13343 - RNA, 21 nt, RNAi-sense strand
ugcuaaggaaggaugaugcuu

SEQ ID NO: 13344 - RNA, 21 nt, RNAi-antisense strand
gcaucauccuuccuuagcauu

SEQ ID NO: 13345 - DNA, 21 bp, Homo sapiens
taaatgacaccagcgcctttg

SEQ ID NO: 13346 - RNA, 21 nt, RNAi-sense strand
aaugacaccagcgccuuuguu

SEQ ID NO: 13347 - RNA, 21 nt, RNAi-antisense strand
caaaggcgcuggugucauuuu

SEQ ID NO: 13348 - DNA, 21 bp, Homo sapiens
tactggaccaagacttacctt

SEQ ID NO: 13349 - RNA, 21 nt, RNAi-sense strand
cuggaccaagacuuaccuuuu

SEQ ID NO: 13350 - RNA, 21 nt, RNAi-antisense strand
aagguaagucuugguccaguu

SEQ ID NO: 13351 - DNA, 21 bp, Homo sapiens
tacctttgaccaacagtcagc

SEQ ID NO: 13352 - RNA, 21 nt, RNAi-sense strand
ccuuugaccaacagucagcuu

SEQ ID NO: 13353 - RNA, 21 nt, RNAi-antisense strand
gcugacuguuggucaaagguu

SEQ ID NO: 13354 - DNA, 21 bp, Homo sapiens
tactgaagcagagaaaggtga

SEQ ID NO: 13355 - RNA, 21 nt, RNAi-sense strand
cugaagcagagaaaggugauu

SEQ ID NO: 13356 - RNA, 21 nt, RNAi-antisense strand
ucaccuuucucugcuucaguu

SEQ ID NO: 13357 - DNA, 21 bp, Homo sapiens
taggtggatacattgcaaata

SEQ ID NO: 13358 - RNA, 21 nt, RNAi-sense strand
gguggauacauugcaaauauu

SEQ ID NO: 13359 - RNA, 21 nt, RNAi-antisense strand
uauuugcaauguauccaccuu

SEQ ID NO: 13360 - DNA, 21 bp, Homo sapiens
tacattgcaaatagcctagca

SEQ ID NO: 13361 - RNA, 21 nt, RNAi-sense strand
cauugcaaauagccuagcauu

SEQ ID NO: 13362 - RNA, 21 nt, RNAi-antisense strand
ugcuaggcuauuugcaauguu

SEQ ID NO: 13363 - DNA, 21 bp, Homo sapiens
tagcctagcaatcatgacaga

SEQ ID NO: 13364 - RNA, 21 nt, RNAi-sense strand
gccuagcaaucaugacagauu

SEQ ID NO: 13365 - RNA, 21 nt, RNAi-antisense strand
ucugucaugauugcuaggcuu

SEQ ID NO: 13366 - DNA, 21 bp, Homo sapiens
tagcaatcatgacagatgcac

SEQ ID NO: 13367 - RNA, 21 nt, RNAi-sense strand
gcaaucaugacagaugcacuu

SEQ ID NO: 13368 - RNA, 21 nt, RNAi-antisense strand
gugcaucugucaugauugcuu

SEQ ID NO: 13369 - DNA, 21 bp, Homo sapiens
tatgttaactgacctaagcgc

SEQ ID NO: 13370 - RNA, 21 nt, RNAi-sense strand
uguuaacugaccuaagcgcuu

SEQ ID NO: 13371 - RNA, 21 nt, RNAi-antisense strand
gcgcuuaggucaguuaacauu

SEQ ID NO: 13372 - DNA, 21 bp, Homo sapiens
taactgacctaagcgccatca

SEQ ID NO: 13373 - RNA, 21 nt, RNAi-sense strand
acugaccuaagcgccaucauu

SEQ ID NO: 13374 - RNA, 21 nt, RNAi-antisense strand
ugauggcgcuuaggucaguuu

SEQ ID NO: 13375 - DNA, 21 bp, Homo sapiens
tatgattagtgtgctgttggt

SEQ ID NO: 13376 - RNA, 21 nt, RNAi-sense strand
ugauuagugugcuguugguuu

SEQ ID NO: 13377 - RNA, 21 nt, RNAi-antisense strand
accaacagcacacuaaucauu

SEQ ID NO: 13378 - DNA, 21 bp, Homo sapiens
tagtgtgctgttggtgtatat

SEQ ID NO: 13379 - RNA, 21 nt, RNAi-sense strand
gugugcuguugguguauauuu

SEQ ID NO: 13380 - RNA, 21 nt, RNAi-antisense strand
auauacaccaacagcacacuu

SEQ ID NO: 13381 - DNA, 21 bp, Homo sapiens
tatatgaagctgtgcaaagaa

SEQ ID NO: 13382 - RNA, 21 nt, RNAi-sense strand
uaugaagcugugcaaagaauu

SEQ ID NO: 13383 - RNA, 21 nt, RNAi-antisense strand
uucuuugcacagcuucauauu

SEQ ID NO: 13384 - DNA, 21 bp, Homo sapiens
tatgaagctgtgcaaagaact

SEQ ID NO: 13385 - RNA, 21 nt, RNAi-sense strand
ugaagcugugcaaagaacuuu

SEQ ID NO: 13386 - RNA, 21 nt, RNAi-antisense strand
aguucuuugcacagcuucauu

SEQ ID NO: 13387 - DNA, 21 bp, Homo sapiens
tataatgctcatcaccgcagc

SEQ ID NO: 13388 - RNA, 21 nt, RNAi-sense strand
uaaugcucaucaccgcagcuu

SEQ ID NO: 13389 - RNA, 21 nt, RNAi-antisense strand
gcugcggugaugagcauuauu

SEQ ID NO: 13390 - DNA, 21 bp, Homo sapiens
taatgctcatcaccgcagctg

SEQ ID NO: 13391 - RNA, 21 nt, RNAi-sense strand
augcucaucaccgcagcuguu

SEQ ID NO: 13392 - RNA, 21 nt, RNAi-antisense strand
cagcugcggugaugagcauuu

SEQ ID NO: 13393 - DNA, 21 bp, Homo sapiens
tagcctggcagtgagagctgc

SEQ ID NO: 13394 - RNA, 21 nt, RNAi-sense strand
gccuggcagugagagcugcuu

SEQ ID NO: 13395 - RNA, 21 nt, RNAi-antisense strand
gcagcucucacugccaggcuu

SEQ ID NO: 13396 - DNA, 21 bp, Homo sapiens
tacagagtgttggtgtgctaa

SEQ ID NO: 13397 - RNA, 21 nt, RNAi-sense strand
cagaguguuggugugcuaauu

SEQ ID NO: 13398 - RNA, 21 nt, RNAi-antisense strand
uuagcacaccaacacucuguu

SEQ ID NO: 13399 - DNA, 21 bp, Homo sapiens
taatagctgcatacatcatac

SEQ ID NO: 13400 - RNA, 21 nt, RNAi-sense strand
auagcugcauacaucauacuu

SEQ ID NO: 13401 - RNA, 21 nt, RNAi-antisense strand
guaugauguaugcagcuauuu

SEQ ID NO: 13402 - DNA, 21 bp, Homo sapiens
tagctgcatacatcatacgat

SEQ ID NO: 13403 - RNA, 21 nt, RNAi-sense strand
gcugcauacaucauacgauuu

SEQ ID NO: 13404 - RNA, 21 nt, RNAi-antisense strand
aucguaugauguaugcagcuu

SEQ ID NO: 13405 - DNA, 21 bp, Homo sapiens
tacatcatacgattcaagcca

SEQ ID NO: 13406 - RNA, 21 nt, RNAi-sense strand
caucauacgauucaagccauu

SEQ ID NO: 13407 - RNA, 21 nt, RNAi-antisense strand
uggcuugaaucguaugauguu

SEQ ID NO: 13408 - DNA, 21 bp, Homo sapiens
tacgattcaagccagaataca

SEQ ID NO: 13409 - RNA, 21 nt, RNAi-sense strand
cgauucaagccagaauacauu

SEQ ID NO: 13410 - RNA, 21 nt, RNAi-antisense strand
uguauucuggcuugaaucguu

SEQ ID NO: 13411 - DNA, 21 bp, Homo sapiens
tataatactagaaggtgtgcc

SEQ ID NO: 13412 - RNA, 21 nt, RNAi-sense strand
uaauacuagaaggugugccuu

SEQ ID NO: 13413 - RNA, 21 nt, RNAi-antisense strand
ggcacaccuucuaguauuauu

SEQ ID NO: 13414 - DNA, 21 bp, Homo sapiens
taatactagaaggtgtgccaa

SEQ ID NO: 13415 - RNA, 21 nt, RNAi-sense strand
auacuagaaggugugccaauu

SEQ ID NO: 13416 - RNA, 21 nt, RNAi-antisense strand
uuggcacaccuucuaguauuu

SEQ ID NO: 13417 - DNA, 21 bp, Homo sapiens
tactagaaggtgtgccaagcc

SEQ ID NO: 13418 - RNA, 21 nt, RNAi-sense strand
cuagaaggugugccaagccuu

SEQ ID NO: 13419 - RNA, 21 nt, RNAi-antisense strand
ggcuuggcacaccuucuaguu

SEQ ID NO: 13420 - DNA, 21 bp, Homo sapiens
tagaaggtgtgccaagccatt

SEQ ID NO: 13421 - RNA, 21 nt, RNAi-sense strand
gaaggugugccaagccauuuu

SEQ ID NO: 13422 - RNA, 21 nt, RNAi-antisense strand
aauggcuuggcacaccuucuu

SEQ ID NO: 13423 - DNA, 21 bp, Homo sapiens
tagactatatcaaagaagcct

SEQ ID NO: 13424 - RNA, 21 nt, RNAi-sense strand
gacuauaucaaagaagccuuu

SEQ ID NO: 13425 - RNA, 21 nt, RNAi-antisense strand
aggcuucuuugauauagucuu

SEQ ID NO: 13426 - DNA, 21 bp, Homo sapiens
tatatcaaagaagccttgatg

SEQ ID NO: 13427 - RNA, 21 nt, RNAi-sense strand
uaucaaagaagccuugauguu

SEQ ID NO: 13428 - RNA, 21 nt, RNAi-antisense strand
caucaaggcuucuuugauauu

SEQ ID NO: 13429 - DNA, 21 bp, Homo sapiens
tatcaaagaagccttgatgaa

SEQ ID NO: 13430 - RNA, 21 nt, RNAi-sense strand
ucaaagaagccuugaugaauu

SEQ ID NO: 13431 - RNA, 21 nt, RNAi-antisense strand
uucaucaaggcuucuuugauu

SEQ ID NO: 13432 - DNA, 21 bp, Homo sapiens
tagaagatgtatattcagtcg

SEQ ID NO: 13433 - RNA, 21 nt, RNAi-sense strand
gaagauguauauucagucguu

SEQ ID NO: 13434 - RNA, 21 nt, RNAi-antisense strand
cgacugaauauacaucuucuu

SEQ ID NO: 13435 - DNA, 21 bp, Homo sapiens
taaatatctggtctctcactt

SEQ ID NO: 13436 - RNA, 21 nt, RNAi-sense strand
aauaucuggucucucacuuuu

SEQ ID NO: 13437 - RNA, 21 nt, RNAi-antisense strand
aagugagagaccagauauuuu

SEQ ID NO: 13438 - DNA, 21 bp, Homo sapiens
tatctggtctctcacttcagg

SEQ ID NO: 13439 - RNA, 21 nt, RNAi-sense strand
ucuggucucucacuucagguu

SEQ ID NO: 13440 - RNA, 21 nt, RNAi-antisense strand
ccugaagugagagaccagauu

SEQ ID NO: 13441 - DNA, 21 bp, Homo sapiens
tactgccatagttcacataca

SEQ ID NO: 13442 - RNA, 21 nt, RNAi-sense strand
cugccauaguucacauacauu

SEQ ID NO: 13443 - RNA, 21 nt, RNAi-antisense strand
uguaugugaacuauggcaguu

SEQ ID NO: 13444 - DNA, 21 bp, Homo sapiens
tagttcacatacagctaattc

SEQ ID NO: 13445 - RNA, 21 nt, RNAi-sense strand
guucacauacagcuaauucuu

SEQ ID NO: 13446 - RNA, 21 nt, RNAi-antisense strand
gaauuagcuguaugugaacuu

SEQ ID NO: 13447 - DNA, 21 bp, Homo sapiens
tacagctaattcctggaagtt

SEQ ID NO: 13448 - RNA, 21 nt, RNAi-sense strand
cagcuaauuccuggaaguuuu

SEQ ID NO: 13449 - RNA, 21 nt, RNAi-antisense strand
aacuuccaggaauuagcuguu

SEQ ID NO: 13450 - DNA, 21 bp, Homo sapiens
taattcctggaagttcatcta

SEQ ID NO: 13451 - RNA, 21 nt, RNAi-sense strand
auuccuggaaguucaucuauu

SEQ ID NO: 13452 - RNA, 21 nt, RNAi-antisense strand
uagaugaacuuccaggaauuu

SEQ ID NO: 13453 - DNA, 21 bp, Homo sapiens
tacagtccaaagcaaaccatt

SEQ ID NO: 13454 - RNA, 21 nt, RNAi-sense strand
caguccaaagcaaaccauuuu

SEQ ID NO: 13455 - RNA, 21 nt, RNAi-antisense strand
aaugguuugcuuuggacuguu

SEQ ID NO: 13456 - DNA, 21 bp, Homo sapiens
tattgaacacatttggcatgt

SEQ ID NO: 13457 - RNA, 21 nt, RNAi-sense strand
uugaacacauuuggcauguuu

SEQ ID NO: 13458 - RNA, 21 nt, RNAi-antisense strand
acaugccaaauguguucaauu

SEQ ID NO: 13459 - DNA, 21 bp, Homo sapiens
tagatgtactattcagcttca

SEQ ID NO: 13460 - RNA, 21 nt, RNAi-sense strand
gauguacuauucagcuucauu

SEQ ID NO: 13461 - RNA, 21 nt, RNAi-antisense strand
ugaagcugaauaguacaucuu

SEQ ID NO: 13462 - DNA, 21 bp, Homo sapiens
tactattcagcttcagagtta

SEQ ID NO: 13463 - RNA, 21 nt, RNAi-sense strand
cuauucagcuucagaguuauu

SEQ ID NO: 13464 - RNA, 21 nt, RNAi-antisense strand
uaacucugaagcugaauaguu

SEQ ID NO: 13465 - DNA, 21 bp, Homo sapiens
tattcagcttcagagttacag

SEQ ID NO: 13466 - RNA, 21 nt, RNAi-sense strand
uucagcuucagaguuacaguu

SEQ ID NO: 13467 - RNA, 21 nt, RNAi-antisense strand
cuguaacucugaagcugaauu

SEQ ID NO: 13468 - DNA, 21 bp, Homo sapiens
tacaggcaagaagtggacaga

SEQ ID NO: 13469 - RNA, 21 nt, RNAi-sense strand
caggcaagaaguggacagauu

SEQ ID NO: 13470 - RNA, 21 nt, RNAi-antisense strand
ucuguccacuucuugccuguu

SEQ ID NO: 13471 - DNA, 21 bp, Homo sapiens
tatttatcctgcagtcacaga

SEQ ID NO: 13472 - RNA, 21 nt, RNAi-sense strand
uuuauccugcagucacagauu

SEQ ID NO: 13473 - RNA, 21 nt, RNAi-antisense strand
ucugugacugcaggauaaauu

SEQ ID NO: 13474 - DNA, 21 bp, Homo sapiens
tatcctgcagtcacagacttg

SEQ ID NO: 13475 - RNA, 21 nt, RNAi-sense strand
uccugcagucacagacuuguu

SEQ ID NO: 13476 - RNA, 21 nt, RNAi-antisense strand
caagucugugacugcaggauu

SEQ ID NO: 13477 - DNA, 21 bp, Homo sapiens
aaagccaggttgaccattgct

SEQ ID NO: 13478 - RNA, 21 nt, RNAi-sense strand
agccagguugaccauugcuuu

SEQ ID NO: 13479 - RNA, 21 nt, RNAi-antisense strand
agcaauggucaaccuggcuuu

SEQ ID NO: 13480 - DNA, 21 bp, Homo sapiens
aaatagcctagcaatcatgac

SEQ ID NO: 13481 - RNA, 21 nt, RNAi-sense strand
auagccuagcaaucaugacuu

SEQ ID NO: 13482 - RNA, 21 nt, RNAi-antisense strand
gucaugauugcuaggcuauuu

SEQ ID NO: 13483 - DNA, 21 bp, Homo sapiens
aatagcctagcaatcatgaca

SEQ ID NO: 13484 - RNA, 21 nt, RNAi-sense strand
uagccuagcaaucaugacauu

SEQ ID NO: 13485 - RNA, 21 nt, RNAi-antisense strand
ugucaugauugcuaggcuauu

SEQ ID NO: 13486 - DNA, 21 bp, Homo sapiens
aactgacctaagcgccatcat

SEQ ID NO: 13487 - RNA, 21 nt, RNAi-sense strand
cugaccuaagcgccaucauuu

SEQ ID NO: 13488 - RNA, 21 nt, RNAi-antisense strand
augauggcgcuuaggucaguu

SEQ ID NO: 13489 - DNA, 21 bp, Homo sapiens
aatggagatataatgctcatc

SEQ ID NO: 13490 - RNA, 21 nt, RNAi-sense strand
uggagauauaaugcucaucuu

SEQ ID NO: 13491 - RNA, 21 nt, RNAi-antisense strand
gaugagcauuauaucuccauu

SEQ ID NO: 13492 - DNA, 21 bp, Homo sapiens
aatagctgcatacatcatacg

SEQ ID NO: 13493 - RNA, 21 nt, RNAi-sense strand
uagcugcauacaucauacguu

SEQ ID NO: 13494 - RNA, 21 nt, RNAi-antisense strand
cguaugauguaugcagcuauu

SEQ ID NO: 13495 - DNA, 21 bp, Homo sapiens
aagatgtatattcagtcgaag

SEQ ID NO: 13496 - RNA, 21 nt, RNAi-sense strand
gauguauauucagucgaaguu

SEQ ID NO: 13497 - RNA, 21 nt, RNAi-antisense strand
cuucgacugaauauacaucuu

SEQ ID NO: 13498 - DNA, 21 bp, Homo sapiens
caacaaacttcgagttgtggt

SEQ ID NO: 13499 - RNA, 21 nt, RNAi-sense strand
acaaacuucgaguugugguuu

SEQ ID NO: 13500 - RNA, 21 nt, RNAi-antisense strand
accacaacucgaaguuuguuu

SEQ ID NO: 13501 - DNA, 21 bp, Homo sapiens
caggccgacgatgattcctta

SEQ ID NO: 13502 - RNA, 21 nt, RNAi-sense strand
ggccgacgaugauuccuuauu

SEQ ID NO: 13503 - RNA, 21 nt, RNAi-antisense strand
uaaggaaucaucgucggccuu

SEQ ID NO: 13504 - DNA, 21 bp, Homo sapiens
cagctgagtttgaaggtggac

SEQ ID NO: 13505 - RNA, 21 nt, RNAi-sense strand
gcugaguuugaagguggacuu

SEQ ID NO: 13506 - RNA, 21 nt, RNAi-antisense strand
guccaccuucaaacucagcuu

SEQ ID NO: 13507 - DNA, 21 bp, Homo sapiens
cattgctgccgttctgtactt

SEQ ID NO: 13508 - RNA, 21 nt, RNAi-sense strand
uugcugccguucuguacuuuu

SEQ ID NO: 13509 - RNA, 21 nt, RNAi-antisense strand
aaguacagaacggcagcaauu

SEQ ID NO: 13510 - DNA, 21 bp, Homo sapiens
catgattggagaacttgtagg

SEQ ID NO: 13511 - RNA, 21 nt, RNAi-sense strand
ugauuggagaacuuguagguu

SEQ ID NO: 13512 - RNA, 21 nt, RNAi-antisense strand
ccuacaaguucuccaaucauu

SEQ ID NO: 13513 - DNA, 21 bp, Homo sapiens
cattgcaaatagcctagcaat

SEQ ID NO: 13514 - RNA, 21 nt, RNAi-sense strand
uugcaaauagccuagcaauuu

SEQ ID NO: 13515 - RNA, 21 nt, RNAi-antisense strand
auugcuaggcuauuugcaauu

SEQ ID NO: 13516 - DNA, 21 bp, Homo sapiens
caaatagcctagcaatcatga

SEQ ID NO: 13517 - RNA, 21 nt, RNAi-sense strand
aauagccuagcaaucaugauu

SEQ ID NO: 13518 - RNA, 21 nt, RNAi-antisense strand
ucaugauugcuaggcuauuuu

SEQ ID NO: 13519 - DNA, 21 bp, Homo sapiens
catatgttaactgacctaagc

SEQ ID NO: 13520 - RNA, 21 nt, RNAi-sense strand
uauguuaacugaccuaagcuu

SEQ ID NO: 13521 - RNA, 21 nt, RNAi-antisense strand
gcuuaggucaguuaacauauu

SEQ ID NO: 13522 - DNA, 21 bp, Homo sapiens
cagctatgattagtgtgctgt

SEQ ID NO: 13523 - RNA, 21 nt, RNAi-sense strand
gcuaugauuagugugcuguuu

SEQ ID NO: 13524 - RNA, 21 nt, RNAi-antisense strand
acagcacacuaaucauagcuu

SEQ ID NO: 13525 - DNA, 21 bp, Homo sapiens
cagagtgttggtgtgctaata

SEQ ID NO: 13526 - RNA, 21 nt, RNAi-sense strand
gaguguuggugugcuaauauu

SEQ ID NO: 13527 - RNA, 21 nt, RNAi-antisense strand
uauuagcacaccaacacucuu

SEQ ID NO: 13528 - DNA, 21 bp, Homo sapiens
gattccttactggaccaagac

SEQ ID NO: 13529 - RNA, 21 nt, RNAi-sense strand
uuccuuacuggaccaagacuu

SEQ ID NO: 13530 - RNA, 21 nt, RNAi-antisense strand
gucuugguccaguaaggaauu

SEQ ID NO: 13531 - DNA, 21 bp, Homo sapiens
gaaagccaggttgaccattgc

SEQ ID NO: 13532 - RNA, 21 nt, RNAi-sense strand
aagccagguugaccauugcuu

SEQ ID NO: 13533 - RNA, 21 nt, RNAi-antisense strand
gcaauggucaaccuggcuuuu

SEQ ID NO: 13534 - DNA, 21 bp, Homo sapiens
gaccattgctgccgttctgta

SEQ ID NO: 13535 - RNA, 21 nt, RNAi-sense strand
ccauugcugccguucuguauu

SEQ ID NO: 13536 - RNA, 21 nt, RNAi-antisense strand
uacagaacggcagcaaugguu

SEQ ID NO: 13537 - DNA, 21 bp, Homo sapiens
gattggagaacttgtaggtgg

SEQ ID NO: 13538 - RNA, 21 nt, RNAi-sense strand
uuggagaacuuguaggugguu

SEQ ID NO: 13539 - RNA, 21 nt, RNAi-antisense strand
ccaccuacaaguucuccaauu

SEQ ID NO: 13540 - DNA, 21 bp, Homo sapiens
gacctaagcgccatcatactc

SEQ ID NO: 13541 - RNA, 21 nt, RNAi-sense strand
ccuaagcgccaucauacucuu

SEQ ID NO: 13542 - RNA, 21 nt, RNAi-antisense strand
gaguaugauggcgcuuagguu

SEQ ID NO: 13543 - DNA, 21 bp, Homo sapiens
gatttcatcgcttagaggttt

SEQ ID NO: 13544 - RNA, 21 nt, RNAi-sense strand
uuucaucgcuuagagguuuuu

SEQ ID NO: 13545 - RNA, 21 nt, RNAi-antisense strand
aaaccucuaagcgaugaaauu

SEQ ID NO: 13546 - DNA, 21 bp, Homo sapiens
gattcctcttatatgaagctg

SEQ ID NO: 13547 - RNA, 21 nt, RNAi-sense strand
uuccucuuauaugaagcuguu

SEQ ID NO: 13548 - RNA, 21 nt, RNAi-antisense strand
cagcuucauauaagaggaauu

SEQ ID NO: 13549 - DNA, 21 bp, Homo sapiens
gagtgttggtgtgctaatagc

SEQ ID NO: 13550 - RNA, 21 nt, RNAi-sense strand
guguuggugugcuaauagcuu

SEQ ID NO: 13551 - RNA, 21 nt, RNAi-antisense strand
gcuauuagcacaccaacacuu

SEQ ID NO: 13552 - DNA, 21 bp, Homo sapiens
gaggaagtacagtccaaagca

SEQ ID NO: 13553 - RNA, 21 nt, RNAi-sense strand
ggaaguacaguccaaagcauu

SEQ ID NO: 13554 - RNA, 21 nt, RNAi-antisense strand
ugcuuuggacuguacuuccuu

SEQ ID NO: 13555 - DNA, 21 bp, Homo sapiens
taggtggatacattgcaaata

SEQ ID NO: 13556 - RNA, 21 nt, RNAi-sense strand
gguggauacauugcaaauauu

SEQ ID NO: 13557 - RNA, 21 nt, RNAi-antisense strand
uauuugcaauguauccaccuu

SEQ ID NO: 13558 - DNA, 21 bp, Homo sapiens
tatgttaactgacctaagcgc

SEQ ID NO: 13559 - RNA, 21 nt, RNAi-sense strand
uguuaacugaccuaagcgcuu

SEQ ID NO: 13560 - RNA, 21 nt, RNAi-antisense strand
gcgcuuaggucaguuaacauu

SEQ ID NO: 13561 - DNA, 21 bp, Homo sapiens
taactgacctaagcgccatca

SEQ ID NO: 13562 - RNA, 21 nt, RNAi-sense strand
acugaccuaagcgccaucauu

SEQ ID NO: 13563 - RNA, 21 nt, RNAi-antisense strand
ugauggcgcuuaggucaguuu

SEQ ID NO: 13564 - DNA, 21 bp, Homo sapiens
tatgaagctgtgcaaagaact

SEQ ID NO: 13565 - RNA, 21 nt, RNAi-sense strand
ugaagcugugcaaagaacuuu

SEQ ID NO: 13566 - RNA, 21 nt, RNAi-antisense strand
aguucuuugcacagcuucauu

SEQ ID NO: 13567 - DNA, 21 bp, Homo sapiens
tagctgcatacatcatacgat

SEQ ID NO: 13568 - RNA, 21 nt, RNAi-sense strand
gcugcauacaucauacgauuu

SEQ ID NO: 13569 - RNA, 21 nt, RNAi-antisense strand
aucguaugauguaugcagcuu

SEQ ID NO: 13570 - DNA, 21 bp, Homo sapiens
tagaagatgtatattcagtcg

SEQ ID NO: 13571 - RNA, 21 nt, RNAi-sense strand
gaagauguauauucagucguu

SEQ ID NO: 13572 - RNA, 21 nt, RNAi-antisense strand
cgacugaauauacaucuucuu

SEQ ID NO: 13573 - DNA, 21 bp, Homo sapiens
tactgccatagttcacataca

SEQ ID NO: 13574 - RNA, 21 nt, RNAi-sense strand
cugccauaguucacauacauu

SEQ ID NO: 13575 - RNA, 21 nt, RNAi-antisense strand
uguaugugaacuauggcaguu

SEQ ID NO: 13576 - DNA, 21 bp, Homo sapiens
aatcaggaagaccagctcctc

SEQ ID NO: 13577 - RNA, 21 nt, RNAi-sense strand
ucaggaagaccagcuccucuu

SEQ ID NO: 13578 - RNA, 21 nt, RNAi-antisense strand
gaggagcuggucuuccugauu

SEQ ID NO: 13579 - DNA, 21 bp, Homo sapiens
aagaccagctcctcctactgt

SEQ ID NO: 13580 - RNA, 21 nt, RNAi-sense strand
gaccagcuccuccuacuguuu

SEQ ID NO: 13581 - RNA, 21 nt, RNAi-antisense strand
acaguaggaggagcuggucuu

SEQ ID NO: 13582 - DNA, 21 bp, Homo sapiens
aaggcatgctgttggctctag

SEQ ID NO: 13583 - RNA, 21 nt, RNAi-sense strand
ggcaugcuguuggcucuaguu

SEQ ID NO: 13584 - RNA, 21 nt, RNAi-antisense strand
cuagagccaacagcaugccuu

SEQ ID NO: 13585 - DNA, 21 bp, Homo sapiens
aacaaagtcagtcaccaggcc

SEQ ID NO: 13586 - RNA, 21 nt, RNAi-sense strand
caaagucagucaccaggccuu

SEQ ID NO: 13587 - RNA, 21 nt, RNAi-antisense strand
ggccuggugacugacuuuguu

SEQ ID NO: 13588 - DNA, 21 bp, Homo sapiens
aaagtcagtcaccaggccaac

SEQ ID NO: 13589 - RNA, 21 nt, RNAi-sense strand
agucagucaccaggccaacuu

SEQ ID NO: 13590 - RNA, 21 nt, RNAi-antisense strand
guuggccuggugacugacuuu

SEQ ID NO: 13591 - DNA, 21 bp, Homo sapiens
aagtcagtcaccaggccaact

SEQ ID NO: 13592 - RNA, 21 nt, RNAi-sense strand
gucagucaccaggccaacuuu

SEQ ID NO: 13593 - RNA, 21 nt, RNAi-antisense strand
aguuggccuggugacugacuu

SEQ ID NO: 13594 - DNA, 21 bp, Homo sapiens
aatcacttgtgatcttcctgt

SEQ ID NO: 13595 - RNA, 21 nt, RNAi-sense strand
ucacuugugaucuuccuguuu

SEQ ID NO: 13596 - RNA, 21 nt, RNAi-antisense strand
acaggaagaucacaagugauu

SEQ ID NO: 13597 - DNA, 21 bp, Homo sapiens
aatcaggaatcagtcgagaaa

SEQ ID NO: 13598 - RNA, 21 nt, RNAi-sense strand
ucaggaaucagucgagaaauu

SEQ ID NO: 13599 - RNA, 21 nt, RNAi-antisense strand
uuucucgacugauuccugauu

SEQ ID NO: 13600 - DNA, 21 bp, Homo sapiens
aagtatcatacttatgcaagc

SEQ ID NO: 13601 - RNA, 21 nt, RNAi-sense strand
guaucauacuuaugcaagcuu

SEQ ID NO: 13602 - RNA, 21 nt, RNAi-antisense strand
gcuugcauaaguaugauacuu

SEQ ID NO: 13603 - DNA, 21 bp, Homo sapiens
aaatctaattgaacgtgactc

SEQ ID NO: 13604 - RNA, 21 nt, RNAi-sense strand
aucuaauugaacgugacucuu

SEQ ID NO: 13605 - RNA, 21 nt, RNAi-antisense strand
gagucacguucaauuagauuu

SEQ ID NO: 13606 - DNA, 21 bp, Homo sapiens
aatctaattgaacgtgactct

SEQ ID NO: 13607 - RNA, 21 nt, RNAi-sense strand
ucuaauugaacgugacucuuu

SEQ ID NO: 13608 - RNA, 21 nt, RNAi-antisense strand
agagucacguucaauuagauu

SEQ ID NO: 13609 - DNA, 21 bp, Homo sapiens
aagaaactctttggcagtgga

SEQ ID NO: 13610 - RNA, 21 nt, RNAi-sense strand
gaaacucuuuggcaguggauu

SEQ ID NO: 13611 - RNA, 21 nt, RNAi-antisense strand
uccacugccaaagaguuucuu

SEQ ID NO: 13612 - DNA, 21 bp, Homo sapiens
aaactctttggcagtggaaca

SEQ ID NO: 13613 - RNA, 21 nt, RNAi-sense strand
acucuuuggcaguggaacauu

SEQ ID NO: 13614 - RNA, 21 nt, RNAi-antisense strand
uguuccacugccaaagaguuu

SEQ ID NO: 13615 - DNA, 21 bp, Homo sapiens
aactctttggcagtggaacaa

SEQ ID NO: 13616 - RNA, 21 nt, RNAi-sense strand
cucuuuggcaguggaacaauu

SEQ ID NO: 13617 - RNA, 21 nt, RNAi-antisense strand
uuguuccacugccaaagaguu

SEQ ID NO: 13618 - DNA, 21 bp, Homo sapiens
aacaacacttgttgtcacaga

SEQ ID NO: 13619 - RNA, 21 nt, RNAi-sense strand
caacacuuguugucacagauu

SEQ ID NO: 13620 - RNA, 21 nt, RNAi-antisense strand
ucugugacaacaaguguuguu

SEQ ID NO: 13621 - DNA, 21 bp, Homo sapiens
aacacttgttgtcacagataa

SEQ ID NO: 13622 - RNA, 21 nt, RNAi-sense strand
cacuuguugucacagauaauu

SEQ ID NO: 13623 - RNA, 21 nt, RNAi-antisense strand
uuaucugugacaacaaguguu

SEQ ID NO: 13624 - DNA, 21 bp, Homo sapiens
aaacaacttgatgcagatgtt

SEQ ID NO: 13625 - RNA, 21 nt, RNAi-sense strand
acaacuugaugcagauguuuu

SEQ ID NO: 13626 - RNA, 21 nt, RNAi-antisense strand
aacaucugcaucaaguuguuu

SEQ ID NO: 13627 - DNA, 21 bp, Homo sapiens
aacaacttgatgcagatgttt

SEQ ID NO: 13628 - RNA, 21 nt, RNAi-sense strand
caacuugaugcagauguuuuu

SEQ ID NO: 13629 - RNA, 21 nt, RNAi-antisense strand
aaacaucugcaucaaguuguu

SEQ ID NO: 13630 - DNA, 21 bp, Homo sapiens
aaactccagaaggctggaaca

SEQ ID NO: 13631 - RNA, 21 nt, RNAi-sense strand
acuccagaaggcuggaacauu

SEQ ID NO: 13632 - RNA, 21 nt, RNAi-antisense strand
uguuccagccuucuggaguuu

SEQ ID NO: 13633 - DNA, 21 bp, Homo sapiens
aactccagaaggctggaacat

SEQ ID NO: 13634 - RNA, 21 nt, RNAi-sense strand
cuccagaaggcuggaacauuu

SEQ ID NO: 13635 - RNA, 21 nt, RNAi-antisense strand
auguuccagccuucuggaguu

SEQ ID NO: 13636 - DNA, 21 bp, Homo sapiens
aaggctggaacatatctttgt

SEQ ID NO: 13637 - RNA, 21 nt, RNAi-sense strand
ggcuggaacauaucuuuguuu

SEQ ID NO: 13638 - RNA, 21 nt, RNAi-antisense strand
acaaagauauguuccagccuu

SEQ ID NO: 13639 - DNA, 21 bp, Homo sapiens
aaagaagagcaacacgattct

SEQ ID NO: 13640 - RNA, 21 nt, RNAi-sense strand
agaagagcaacacgauucuuu

SEQ ID NO: 13641 - RNA, 21 nt, RNAi-antisense strand
agaaucguguugcucuucuuu

SEQ ID NO: 13642 - DNA, 21 bp, Homo sapiens
aagaagagcaacacgattctg

SEQ ID NO: 13643 - RNA, 21 nt, RNAi-sense strand
gaagagcaacacgauucuguu

SEQ ID NO: 13644 - RNA, 21 nt, RNAi-antisense strand
cagaaucguguugcucuucuu

SEQ ID NO: 13645 - DNA, 21 bp, Homo sapiens
aacaccatgaagactaacgac

SEQ ID NO: 13646 - RNA, 21 nt, RNAi-sense strand
caccaugaagacuaacgacuu

SEQ ID NO: 13647 - RNA, 21 nt, RNAi-antisense strand
gucguuagucuucaugguguu

SEQ ID NO: 13648 - DNA, 21 bp, Homo sapiens
aagactaacgacacatacatg

SEQ ID NO: 13649 - RNA, 21 nt, RNAi-sense strand
gacuaacgacacauacauguu

SEQ ID NO: 13650 - RNA, 21 nt, RNAi-antisense strand
cauguaugugucguuagucuu

SEQ ID NO: 13651 - DNA, 21 bp, Homo sapiens
aaatttagctggttaacggtg

SEQ ID NO: 13652 - RNA, 21 nt, RNAi-sense strand
auuuagcugguuaacgguguu

SEQ ID NO: 13653 - RNA, 21 nt, RNAi-antisense strand
caccguuaaccagcuaaauuu

SEQ ID NO: 13654 - DNA, 21 bp, Homo sapiens
aatttagctggttaacggtgc

SEQ ID NO: 13655 - RNA, 21 nt, RNAi-sense strand
uuuagcugguuaacggugcuu

SEQ ID NO: 13656 - RNA, 21 nt, RNAi-antisense strand
gcaccguuaaccagcuaaauu

SEQ ID NO: 13657 - DNA, 21 bp, Homo sapiens
aacggtgccagaagagtcact

SEQ ID NO: 13658 - RNA, 21 nt, RNAi-sense strand
cggugccagaagagucacuuu

SEQ ID NO: 13659 - RNA, 21 nt, RNAi-antisense strand
agugacucuucuggcaccguu

SEQ ID NO: 13660 - DNA, 21 bp, Homo sapiens
aagagtcactggacaaagaac

SEQ ID NO: 13661 - RNA, 21 nt, RNAi-sense strand
gagucacuggacaaagaacuu

SEQ ID NO: 13662 - RNA, 21 nt, RNAi-antisense strand
guucuuuguccagugacucuu

SEQ ID NO: 13663 - DNA, 21 bp, Homo sapiens
aaagaacacagatgtatcgtc

SEQ ID NO: 13664 - RNA, 21 nt, RNAi-sense strand
agaacacagauguaucgucuu

SEQ ID NO: 13665 - RNA, 21 nt, RNAi-antisense strand
gacgauacaucuguguucuuu

SEQ ID NO: 13666 - DNA, 21 bp, Homo sapiens
aagaacacagatgtatcgtca

SEQ ID NO: 13667 - RNA, 21 nt, RNAi-sense strand
gaacacagauguaucgucauu

SEQ ID NO: 13668 - RNA, 21 nt, RNAi-antisense strand
ugacgauacaucuguguucuu

SEQ ID NO: 13669 - DNA, 21 bp, Homo sapiens
aacacagatgtatcgtcagac

SEQ ID NO: 13670 - RNA, 21 nt, RNAi-sense strand
cacagauguaucgucagacuu

SEQ ID NO: 13671 - RNA, 21 nt, RNAi-antisense strand
gucugacgauacaucuguguu

SEQ ID NO: 13672 - DNA, 21 bp, Homo sapiens
aataaagacagatgtcaccac

SEQ ID NO: 13673 - RNA, 21 nt, RNAi-sense strand
uaaagacagaugucaccacuu

SEQ ID NO: 13674 - RNA, 21 nt, RNAi-antisense strand
guggugacaucugucuuuauu

SEQ ID NO: 13675 - DNA, 21 bp, Homo sapiens
aaagacagatgtcaccacagt

SEQ ID NO: 13676 - RNA, 21 nt, RNAi-sense strand
agacagaugucaccacaguuu

SEQ ID NO: 13677 - RNA, 21 nt, RNAi-antisense strand
acuguggugacaucugucuuu

SEQ ID NO: 13678 - DNA, 21 bp, Homo sapiens
aagacagatgtcaccacagtg

SEQ ID NO: 13679 - RNA, 21 nt, RNAi-sense strand
gacagaugucaccacaguguu

SEQ ID NO: 13680 - RNA, 21 nt, RNAi-antisense strand
cacuguggugacaucugucuu

SEQ ID NO: 13681 - DNA, 21 bp, Homo sapiens
aaagatgcaaatgatgtcacc

SEQ ID NO: 13682 - RNA, 21 nt, RNAi-sense strand
agaugcaaaugaugucaccuu

SEQ ID NO: 13683 - RNA, 21 nt, RNAi-antisense strand
ggugacaucauuugcaucuuu

SEQ ID NO: 13684 - DNA, 21 bp, Homo sapiens
aagatgcaaatgatgtcacca

SEQ ID NO: 13685 - RNA, 21 nt, RNAi-sense strand
gaugcaaaugaugucaccauu

SEQ ID NO: 13686 - RNA, 21 nt, RNAi-antisense strand
uggugacaucauuugcaucuu

SEQ ID NO: 13687 - DNA, 21 bp, Homo sapiens
aaatgatgtcaccacagtgga

SEQ ID NO: 13688 - RNA, 21 nt, RNAi-sense strand
augaugucaccacaguggauu

SEQ ID NO: 13689 - RNA, 21 nt, RNAi-antisense strand
uccacuguggugacaucauuu

SEQ ID NO: 13690 - DNA, 21 bp, Homo sapiens
aatgatgtcaccacagtggat

SEQ ID NO: 13691 - RNA, 21 nt, RNAi-sense strand
ugaugucaccacaguggauuu

SEQ ID NO: 13692 - RNA, 21 nt, RNAi-antisense strand
auccacuguggugacaucauu

SEQ ID NO: 13693 - DNA, 21 bp, Homo sapiens
aaaggatgcaaatgatgtcat

SEQ ID NO: 13694 - RNA, 21 nt, RNAi-sense strand
aggaugcaaaugaugucauuu

SEQ ID NO: 13695 - RNA, 21 nt, RNAi-antisense strand
augacaucauuugcauccuuu

SEQ ID NO: 13696 - DNA, 21 bp, Homo sapiens
aaggatgcaaatgatgtcatc

SEQ ID NO: 13697 - RNA, 21 nt, RNAi-sense strand
ggaugcaaaugaugucaucuu

SEQ ID NO: 13698 - RNA, 21 nt, RNAi-antisense strand
gaugacaucauuugcauccuu

SEQ ID NO: 13699 - DNA, 21 bp, Homo sapiens
aaatgatgtcatcacaatgga

SEQ ID NO: 13700 - RNA, 21 nt, RNAi-sense strand
augaugucaucacaauggauu

SEQ ID NO: 13701 - RNA, 21 nt, RNAi-antisense strand
uccauugugaugacaucauuu

SEQ ID NO: 13702 - DNA, 21 bp, Homo sapiens
aatgatgtcatcacaatggat

SEQ ID NO: 13703 - RNA, 21 nt, RNAi-sense strand
ugaugucaucacaauggauuu

SEQ ID NO: 13704 - RNA, 21 nt, RNAi-antisense strand
auccauugugaugacaucauu

SEQ ID NO: 13705 - DNA, 21 bp, Homo sapiens
aagatgcaaatgatacactac

SEQ ID NO: 13706 - RNA, 21 nt, RNAi-sense strand
gaugcaaaugauacacuacuu

SEQ ID NO: 13707 - RNA, 21 nt, RNAi-antisense strand
guaguguaucauuugcaucuu

SEQ ID NO: 13708 - DNA, 21 bp, Homo sapiens
aaatgatacactactgctgca

SEQ ID NO: 13709 - RNA, 21 nt, RNAi-sense strand
augauacacuacugcugcauu

SEQ ID NO: 13710 - RNA, 21 nt, RNAi-antisense strand
ugcagcaguaguguaucauuu

SEQ ID NO: 13711 - DNA, 21 bp, Homo sapiens
aatgatacactactgctgcag

SEQ ID NO: 13712 - RNA, 21 nt, RNAi-sense strand
ugauacacuacugcugcaguu

SEQ ID NO: 13713 - RNA, 21 nt, RNAi-antisense strand
cugcagcaguaguguaucauu

SEQ ID NO: 13714 - DNA, 21 bp, Homo sapiens
aaacacctctgcatattacat

SEQ ID NO: 13715 - RNA, 21 nt, RNAi-sense strand
acaccucugcauauuacauuu

SEQ ID NO: 13716 - RNA, 21 nt, RNAi-antisense strand
auguaauaugcagagguguuu

SEQ ID NO: 13717 - DNA, 21 bp, Homo sapiens
aacacctctgcatattacatg

SEQ ID NO: 13718 - RNA, 21 nt, RNAi-sense strand
caccucugcauauuacauguu

SEQ ID NO: 13719 - RNA, 21 nt, RNAi-antisense strand
cauguaauaugcagagguguu

SEQ ID NO: 13720 - DNA, 21 bp, Homo sapiens
aagaacggctttctgctgcaa

SEQ ID NO: 13721 - RNA, 21 nt, RNAi-sense strand
gaacggcuuucugcugcaauu

SEQ ID NO: 13722 - RNA, 21 nt, RNAi-antisense strand
uugcagcagaaagccguucuu

SEQ ID NO: 13723 - DNA, 21 bp, Homo sapiens
aacggctttctgctgcaatgg

SEQ ID NO: 13724 - RNA, 21 nt, RNAi-sense strand
cggcuuucugcugcaaugguu

SEQ ID NO: 13725 - RNA, 21 nt, RNAi-antisense strand
ccauugcagcagaaagccguu

SEQ ID NO: 13726 - DNA, 21 bp, Homo sapiens
aatggagagaaatcataacag

SEQ ID NO: 13727 - RNA, 21 nt, RNAi-sense strand
uggagagaaaucauaacaguu

SEQ ID NO: 13728 - RNA, 21 nt, RNAi-antisense strand
cuguuaugauuucucuccauu

SEQ ID NO: 13729 - DNA, 21 bp, Homo sapiens
aaatcataacagacggtggca

SEQ ID NO: 13730 - RNA, 21 nt, RNAi-sense strand
aucauaacagacgguggcauu

SEQ ID NO: 13731 - RNA, 21 nt, RNAi-antisense strand
ugccaccgucuguuaugauuu

SEQ ID NO: 13732 - DNA, 21 bp, Homo sapiens
aatcataacagacggtggcac

SEQ ID NO: 13733 - RNA, 21 nt, RNAi-sense strand
ucauaacagacgguggcacuu

SEQ ID NO: 13734 - RNA, 21 nt, RNAi-antisense strand
gugccaccgucuguuaugauu

SEQ ID NO: 13735 - DNA, 21 bp, Homo sapiens
aacagacggtggcacaaggag

SEQ ID NO: 13736 - RNA, 21 nt, RNAi-sense strand
cagacgguggcacaaggaguu

SEQ ID NO: 13737 - RNA, 21 nt, RNAi-antisense strand
cuccuugugccaccgucuguu

SEQ ID NO: 13738 - DNA, 21 bp, Homo sapiens
aagcgtcttctgaggatctag

SEQ ID NO: 13739 - RNA, 21 nt, RNAi-sense strand
gcgucuucugaggaucuaguu

SEQ ID NO: 13740 - RNA, 21 nt, RNAi-antisense strand
cuagauccucagaagacgcuu

SEQ ID NO: 13741 - DNA, 21 bp, Homo sapiens
aacctcagtctgtaataacaa

SEQ ID NO: 13742 - RNA, 21 nt, RNAi-sense strand
ccucagucuguaauaacaauu

SEQ ID NO: 13743 - RNA, 21 nt, RNAi-antisense strand
uuguuauuacagacugagguu

SEQ ID NO: 13744 - DNA, 21 bp, Homo sapiens
aataacaatgaggaatagcca

SEQ ID NO: 13745 - RNA, 21 nt, RNAi-sense strand
uaacaaugaggaauagccauu

SEQ ID NO: 13746 - RNA, 21 nt, RNAi-antisense strand
uggcuauuccucauuguuauu

SEQ ID NO: 13747 - DNA, 21 bp, Homo sapiens
aacaatgaggaatagccatgg

SEQ ID NO: 13748 - RNA, 21 nt, RNAi-sense strand
caaugaggaauagccaugguu

SEQ ID NO: 13749 - RNA, 21 nt, RNAi-antisense strand
ccauggcuauuccucauuguu

SEQ ID NO: 13750 - DNA, 21 bp, Homo sapiens
aatgaggaatagccatggcga

SEQ ID NO: 13751 - RNA, 21 nt, RNAi-sense strand
ugaggaauagccauggcgauu

SEQ ID NO: 13752 - RNA, 21 nt, RNAi-antisense strand
ucgccauggcuauuccucauu

SEQ ID NO: 13753 - DNA, 21 bp, Homo sapiens
aatagccatggcgatctccag

SEQ ID NO: 13754 - RNA, 21 nt, RNAi-sense strand
uagccauggcgaucuccaguu

SEQ ID NO: 13755 - RNA, 21 nt, RNAi-antisense strand
cuggagaucgccauggcuauu

SEQ ID NO: 13756 - DNA, 21 bp, Homo sapiens
aaatagcgcctgctatagtgt

SEQ ID NO: 13757 - RNA, 21 nt, RNAi-sense strand
auagcgccugcuauaguguuu

SEQ ID NO: 13758 - RNA, 21 nt, RNAi-antisense strand
acacuauagcaggcgcuauuu

SEQ ID NO: 13759 - DNA, 21 bp, Homo sapiens
aatagcgcctgctatagtgta

SEQ ID NO: 13760 - RNA, 21 nt, RNAi-sense strand
uagcgccugcuauaguguauu

SEQ ID NO: 13761 - RNA, 21 nt, RNAi-antisense strand
uacacuauagcaggcgcuauu

SEQ ID NO: 13762 - DNA, 21 bp, Homo sapiens
aatcagataactgcctggaag

SEQ ID NO: 13763 - RNA, 21 nt, RNAi-sense strand
ucagauaacugccuggaaguu

SEQ ID NO: 13764 - RNA, 21 nt, RNAi-antisense strand
cuuccaggcaguuaucugauu

SEQ ID NO: 13765 - DNA, 21 bp, Homo sapiens
aactgcctggaagcctttcat

SEQ ID NO: 13766 - RNA, 21 nt, RNAi-sense strand
cugccuggaagccuuucauuu

SEQ ID NO: 13767 - RNA, 21 nt, RNAi-antisense strand
augaaaggcuuccaggcaguu

SEQ ID NO: 13768 - DNA, 21 bp, Homo sapiens
aagcagtcttctttgctagtt

SEQ ID NO: 13769 - RNA, 21 nt, RNAi-sense strand
gcagucuucuuugcuaguuuu

SEQ ID NO: 13770 - RNA, 21 nt, RNAi-antisense strand
aacuagcaaagaagacugcuu

SEQ ID NO: 13771 - DNA, 21 bp, Homo sapiens
caggaagaccagctcctccta

SEQ ID NO: 13772 - RNA, 21 nt, RNAi-sense strand
ggaagaccagcuccuccuauu

SEQ ID NO: 13773 - RNA, 21 nt, RNAi-antisense strand
uaggaggagcuggucuuccuu

SEQ ID NO: 13774 - DNA, 21 bp, Homo sapiens
cagctcctcctactgtcttct

SEQ ID NO: 13775 - RNA, 21 nt, RNAi-sense strand
gcuccuccuacugucuucuuu

SEQ ID NO: 13776 - RNA, 21 nt, RNAi-antisense strand
agaagacaguaggaggagcuu

SEQ ID NO: 13777 - DNA, 21 bp, Homo sapiens
cagagaggaaggcatgctgtt

SEQ ID NO: 13778 - RNA, 21 nt, RNAi-sense strand
gagaggaaggcaugcuguuuu

SEQ ID NO: 13779 - RNA, 21 nt, RNAi-antisense strand
aacagcaugccuuccucucuu

SEQ ID NO: 13780 - DNA, 21 bp, Homo sapiens
catgctgttggctctagctct

SEQ ID NO: 13781 - RNA, 21 nt, RNAi-sense strand
ugcuguuggcucuagcucuuu

SEQ ID NO: 13782 - RNA, 21 nt, RNAi-antisense strand
agagcuagagccaacagcauu

SEQ ID NO: 13783 - DNA, 21 bp, Homo sapiens
cagtcagaaatcttccaactt

SEQ ID NO: 13784 - RNA, 21 nt, RNAi-sense strand
gucagaaaucuuccaacuuuu

SEQ ID NO: 13785 - RNA, 21 nt, RNAi-antisense strand
aaguuggaagauuucugacuu

SEQ ID NO: 13786 - DNA, 21 bp, Homo sapiens
cagaaatcttccaacttggaa

SEQ ID NO: 13787 - RNA, 21 nt, RNAi-sense strand
gaaaucuuccaacuuggaauu

SEQ ID NO: 13788 - RNA, 21 nt, RNAi-antisense strand
uuccaaguuggaagauuucuu

SEQ ID NO: 13789 - DNA, 21 bp, Homo sapiens
caaagtcagtcaccaggccaa

SEQ ID NO: 13790 - RNA, 21 nt, RNAi-sense strand
aagucagucaccaggccaauu

SEQ ID NO: 13791 - RNA, 21 nt, RNAi-antisense strand
uuggccuggugacugacuuuu

SEQ ID NO: 13792 - DNA, 21 bp, Homo sapiens
catcagctgtaatcacttgtg

SEQ ID NO: 13793 - RNA, 21 nt, RNAi-sense strand
ucagcuguaaucacuuguguu

SEQ ID NO: 13794 - RNA, 21 nt, RNAi-antisense strand
cacaagugauuacagcugauu

SEQ ID NO: 13795 - DNA, 21 bp, Homo sapiens
cagctgtaatcacttgtgatc

SEQ ID NO: 13796 - RNA, 21 nt, RNAi-sense strand
gcuguaaucacuugugaucuu

SEQ ID NO: 13797 - RNA, 21 nt, RNAi-antisense strand
gaucacaagugauuacagcuu

SEQ ID NO: 13798 - DNA, 21 bp, Homo sapiens
cacttgtgatcttcctgtaga

SEQ ID NO: 13799 - RNA, 21 nt, RNAi-sense strand
cuugugaucuuccuguagauu

SEQ ID NO: 13800 - RNA, 21 nt, RNAi-antisense strand
ucuacaggaagaucacaaguu

SEQ ID NO: 13801 - DNA, 21 bp, Homo sapiens
cactggtacctacaccaggag

SEQ ID NO: 13802 - RNA, 21 nt, RNAi-sense strand
cugguaccuacaccaggaguu

SEQ ID NO: 13803 - RNA, 21 nt, RNAi-antisense strand
cuccugguguagguaccaguu

SEQ ID NO: 13804 - DNA, 21 bp, Homo sapiens
cacagcgtcttctgtactatg

SEQ ID NO: 13805 - RNA, 21 nt, RNAi-sense strand
cagcgucuucuguacuauguu

SEQ ID NO: 13806 - RNA, 21 nt, RNAi-antisense strand
cauaguacagaagacgcuguu

SEQ ID NO: 13807 - DNA, 21 bp, Homo sapiens
cagcgtcttctgtactatgac

SEQ ID NO: 13808 - RNA, 21 nt, RNAi-sense strand
gcgucuucuguacuaugacuu

SEQ ID NO: 13809 - RNA, 21 nt, RNAi-antisense strand
gucauaguacagaagacgcuu

SEQ ID NO: 13810 - DNA, 21 bp, Homo sapiens
cacctggaaggattattataa

SEQ ID NO: 13811 - RNA, 21 nt, RNAi-sense strand
ccuggaaggauuauuauaauu

SEQ ID NO: 13812 - RNA, 21 nt, RNAi-antisense strand
uuauaauaauccuuccagguu

SEQ ID NO: 13813 - DNA, 21 bp, Homo sapiens
cagtggaacaacacttgttgt

SEQ ID NO: 13814 - RNA, 21 nt, RNAi-sense strand
guggaacaacacuuguuguuu

SEQ ID NO: 13815 - RNA, 21 nt, RNAi-antisense strand
acaacaaguguuguuccacuu

SEQ ID NO: 13816 - DNA, 21 bp, Homo sapiens
caacacttgttgtcacagata

SEQ ID NO: 13817 - RNA, 21 nt, RNAi-sense strand
acacuuguugucacagauauu

SEQ ID NO: 13818 - RNA, 21 nt, RNAi-antisense strand
uaucugugacaacaaguguuu

SEQ ID NO: 13819 - DNA, 21 bp, Homo sapiens
cacttgttgtcacagataaac

SEQ ID NO: 13820 - RNA, 21 nt, RNAi-sense strand
cuuguugucacagauaaacuu

SEQ ID NO: 13821 - RNA, 21 nt, RNAi-antisense strand
guuuaucugugacaacaaguu

SEQ ID NO: 13822 - DNA, 21 bp, Homo sapiens
cacagataaacaacttgatgc

SEQ ID NO: 13823 - RNA, 21 nt, RNAi-sense strand
cagauaaacaacuugaugcuu

SEQ ID NO: 13824 - RNA, 21 nt, RNAi-antisense strand
gcaucaaguuguuuaucuguu

SEQ ID NO: 13825 - DNA, 21 bp, Homo sapiens
cagataaacaacttgatgcag

SEQ ID NO: 13826 - RNA, 21 nt, RNAi-sense strand
gauaaacaacuugaugcaguu

SEQ ID NO: 13827 - RNA, 21 nt, RNAi-antisense strand
cugcaucaaguuguuuaucuu

SEQ ID NO: 13828 - DNA, 21 bp, Homo sapiens
caacttgatgcagatgtttcc

SEQ ID NO: 13829 - RNA, 21 nt, RNAi-sense strand
acuugaugcagauguuuccuu

SEQ ID NO: 13830 - RNA, 21 nt, RNAi-antisense strand
ggaaacaucugcaucaaguuu

SEQ ID NO: 13831 - DNA, 21 bp, Homo sapiens
cagaaggctggaacatatctt

SEQ ID NO: 13832 - RNA, 21 nt, RNAi-sense strand
gaaggcuggaacauaucuuuu

SEQ ID NO: 13833 - RNA, 21 nt, RNAi-antisense strand
aagauauguuccagccuucuu

SEQ ID NO: 13834 - DNA, 21 bp, Homo sapiens
catatctttgtcttcttgaga

SEQ ID NO: 13835 - RNA, 21 nt, RNAi-sense strand
uaucuuugucuucuugagauu

SEQ ID NO: 13836 - RNA, 21 nt, RNAi-antisense strand
ucucaagaagacaaagauauu

SEQ ID NO: 13837 - DNA, 21 bp, Homo sapiens
caccatgaagactaacgacac

SEQ ID NO: 13838 - RNA, 21 nt, RNAi-sense strand
ccaugaagacuaacgacacuu

SEQ ID NO: 13839 - RNA, 21 nt, RNAi-antisense strand
gugucguuagucuucaugguu

SEQ ID NO: 13840 - DNA, 21 bp, Homo sapiens
catgaagactaacgacacata

SEQ ID NO: 13841 - RNA, 21 nt, RNAi-sense strand
ugaagacuaacgacacauauu

SEQ ID NO: 13842 - RNA, 21 nt, RNAi-antisense strand
uaugugucguuagucuucauu

SEQ ID NO: 13843 - DNA, 21 bp, Homo sapiens
cacatacatgaaatttagctg

SEQ ID NO: 13844 - RNA, 21 nt, RNAi-sense strand
cauacaugaaauuuagcuguu

SEQ ID NO: 13845 - RNA, 21 nt, RNAi-antisense strand
cagcuaaauuucauguauguu

SEQ ID NO: 13846 - DNA, 21 bp, Homo sapiens
catacatgaaatttagctggt

SEQ ID NO: 13847 - RNA, 21 nt, RNAi-sense strand
uacaugaaauuuagcugguuu

SEQ ID NO: 13848 - RNA, 21 nt, RNAi-antisense strand
accagcuaaauuucauguauu

SEQ ID NO: 13849 - DNA, 21 bp, Homo sapiens
catgaaatttagctggttaac

SEQ ID NO: 13850 - RNA, 21 nt, RNAi-sense strand
ugaaauuuagcugguuaacuu

SEQ ID NO: 13851 - RNA, 21 nt, RNAi-antisense strand
guuaaccagcuaaauuucauu

SEQ ID NO: 13852 - DNA, 21 bp, Homo sapiens
cagaagagtcactggacaaag

SEQ ID NO: 13853 - RNA, 21 nt, RNAi-sense strand
gaagagucacuggacaaaguu

SEQ ID NO: 13854 - RNA, 21 nt, RNAi-antisense strand
cuuuguccagugacucuucuu

SEQ ID NO: 13855 - DNA, 21 bp, Homo sapiens
cactggacaaagaacacagat

SEQ ID NO: 13856 - RNA, 21 nt, RNAi-sense strand
cuggacaaagaacacagauuu

SEQ ID NO: 13857 - RNA, 21 nt, RNAi-antisense strand
aucuguguucuuuguccaguu

SEQ ID NO: 13858 - DNA, 21 bp, Homo sapiens
caaagaacacagatgtatcgt

SEQ ID NO: 13859 - RNA, 21 nt, RNAi-sense strand
aagaacacagauguaucguuu

SEQ ID NO: 13860 - RNA, 21 nt, RNAi-antisense strand
acgauacaucuguguucuuuu

SEQ ID NO: 13861 - DNA, 21 bp, Homo sapiens
cacagatgtatcgtcagacat

SEQ ID NO: 13862 - RNA, 21 nt, RNAi-sense strand
cagauguaucgucagacauuu

SEQ ID NO: 13863 - RNA, 21 nt, RNAi-antisense strand
augucugacgauacaucuguu

SEQ ID NO: 13864 - DNA, 21 bp, Homo sapiens
cagatgtatcgtcagacatga

SEQ ID NO: 13865 - RNA, 21 nt, RNAi-sense strand
gauguaucgucagacaugauu

SEQ ID NO: 13866 - RNA, 21 nt, RNAi-antisense strand
ucaugucugacgauacaucuu

SEQ ID NO: 13867 - DNA, 21 bp, Homo sapiens
caagaaattatctttcctcca

SEQ ID NO: 13868 - RNA, 21 nt, RNAi-sense strand
agaaauuaucuuuccuccauu

SEQ ID NO: 13869 - RNA, 21 nt, RNAi-antisense strand
uggaggaaagauaauuucuuu

SEQ ID NO: 13870 - DNA, 21 bp, Homo sapiens
caataaagacagatgtcacca

SEQ ID NO: 13871 - RNA, 21 nt, RNAi-sense strand
auaaagacagaugucaccauu

SEQ ID NO: 13872 - RNA, 21 nt, RNAi-antisense strand
uggugacaucugucuuuauuu

SEQ ID NO: 13873 - DNA, 21 bp, Homo sapiens
cagatgtcaccacagtggatc

SEQ ID NO: 13874 - RNA, 21 nt, RNAi-sense strand
gaugucaccacaguggaucuu

SEQ ID NO: 13875 - RNA, 21 nt, RNAi-antisense strand
gauccacuguggugacaucuu

SEQ ID NO: 13876 - DNA, 21 bp, Homo sapiens
caaatgatgtcaccacagtgg

SEQ ID NO: 13877 - RNA, 21 nt, RNAi-sense strand
aaugaugucaccacagugguu

SEQ ID NO: 13878 - RNA, 21 nt, RNAi-antisense strand
ccacuguggugacaucauuuu

SEQ ID NO: 13879 - DNA, 21 bp, Homo sapiens
caaaggatgcaaatgatgtca

SEQ ID NO: 13880 - RNA, 21 nt, RNAi-sense strand
aaggaugcaaaugaugucauu

SEQ ID NO: 13881 - RNA, 21 nt, RNAi-antisense strand
ugacaucauuugcauccuuuu

SEQ ID NO: 13882 - DNA, 21 bp, Homo sapiens
caaatgatgtcatcacaatgg

SEQ ID NO: 13883 - RNA, 21 nt, RNAi-sense strand
aaugaugucaucacaaugguu

SEQ ID NO: 13884 - RNA, 21 nt, RNAi-antisense strand
ccauugugaugacaucauuuu

SEQ ID NO: 13885 - DNA, 21 bp, Homo sapiens
caaatgatacactactgctgc

SEQ ID NO: 13886 - RNA, 21 nt, RNAi-sense strand
aaugauacacuacugcugcuu

SEQ ID NO: 13887 - RNA, 21 nt, RNAi-antisense strand
gcagcaguaguguaucauuuu

SEQ ID NO: 13888 - DNA, 21 bp, Homo sapiens
cactactgctgcagctcacaa

SEQ ID NO: 13889 - RNA, 21 nt, RNAi-sense strand
cuacugcugcagcucacaauu

SEQ ID NO: 13890 - RNA, 21 nt, RNAi-antisense strand
uugugagcugcagcaguaguu

SEQ ID NO: 13891 - DNA, 21 bp, Homo sapiens
cagctcacaaacacctctgca

SEQ ID NO: 13892 - RNA, 21 nt, RNAi-sense strand
gcucacaaacaccucugcauu

SEQ ID NO: 13893 - RNA, 21 nt, RNAi-antisense strand
ugcagagguguuugugagcuu

SEQ ID NO: 13894 - DNA, 21 bp, Homo sapiens
cacaaacacctctgcatatta

SEQ ID NO: 13895 - RNA, 21 nt, RNAi-sense strand
caaacaccucugcauauuauu

SEQ ID NO: 13896 - RNA, 21 nt, RNAi-antisense strand
uaauaugcagagguguuuguu

SEQ ID NO: 13897 - DNA, 21 bp, Homo sapiens
caaacacctctgcatattaca

SEQ ID NO: 13898 - RNA, 21 nt, RNAi-sense strand
aacaccucugcauauuacauu

SEQ ID NO: 13899 - RNA, 21 nt, RNAi-antisense strand
uguaauaugcagagguguuuu

SEQ ID NO: 13900 - DNA, 21 bp, Homo sapiens
cacctctgcatattacatgta

SEQ ID NO: 13901 - RNA, 21 nt, RNAi-sense strand
ccucugcauauuacauguauu

SEQ ID NO: 13902 - RNA, 21 nt, RNAi-antisense strand
uacauguaauaugcagagguu

SEQ ID NO: 13903 - DNA, 21 bp, Homo sapiens
catattacatgtacctcctcc

SEQ ID NO: 13904 - RNA, 21 nt, RNAi-sense strand
uauuacauguaccuccuccuu

SEQ ID NO: 13905 - RNA, 21 nt, RNAi-antisense strand
ggaggagguacauguaauauu

SEQ ID NO: 13906 - DNA, 21 bp, Homo sapiens
catgtacctcctcctgctcct

SEQ ID NO: 13907 - RNA, 21 nt, RNAi-sense strand
uguaccuccuccugcuccuuu

SEQ ID NO: 13908 - RNA, 21 nt, RNAi-antisense strand
aggagcaggaggagguacauu

SEQ ID NO: 13909 - DNA, 21 bp, Homo sapiens
catcatcacctgctgtctgct

SEQ ID NO: 13910 - RNA, 21 nt, RNAi-sense strand
ucaucaccugcugucugcuuu

SEQ ID NO: 13911 - RNA, 21 nt, RNAi-antisense strand
agcagacagcaggugaugauu

SEQ ID NO: 13912 - DNA, 21 bp, Homo sapiens
catcacctgctgtctgcttgg

SEQ ID NO: 13913 - RNA, 21 nt, RNAi-sense strand
ucaccugcugucugcuugguu

SEQ ID NO: 13914 - RNA, 21 nt, RNAi-antisense strand
ccaagcagacagcaggugauu

SEQ ID NO: 13915 - DNA, 21 bp, Homo sapiens
cacctgctgtctgcttggaag

SEQ ID NO: 13916 - RNA, 21 nt, RNAi-sense strand
ccugcugucugcuuggaaguu

SEQ ID NO: 13917 - RNA, 21 nt, RNAi-antisense strand
cuuccaagcagacagcagguu

SEQ ID NO: 13918 - DNA, 21 bp, Homo sapiens
caatggagagaaatcataaca

SEQ ID NO: 13919 - RNA, 21 nt, RNAi-sense strand
auggagagaaaucauaacauu

SEQ ID NO: 13920 - RNA, 21 nt, RNAi-antisense strand
uguuaugauuucucuccauuu

SEQ ID NO: 13921 - DNA, 21 bp, Homo sapiens
cataacagacggtggcacaag

SEQ ID NO: 13922 - RNA, 21 nt, RNAi-sense strand
uaacagacgguggcacaaguu

SEQ ID NO: 13923 - RNA, 21 nt, RNAi-antisense strand
cuugugccaccgucuguuauu

SEQ ID NO: 13924 - DNA, 21 bp, Homo sapiens
catttcagttctcatgtgtgt

SEQ ID NO: 13925 - RNA, 21 nt, RNAi-sense strand
uuucaguucucauguguguuu

SEQ ID NO: 13926 - RNA, 21 nt, RNAi-antisense strand
acacacaugagaacugaaauu

SEQ ID NO: 13927 - DNA, 21 bp, Homo sapiens
cagttctcatgtgtgtactat

SEQ ID NO: 13928 - RNA, 21 nt, RNAi-sense strand
guucucauguguguacuauuu

SEQ ID NO: 13929 - RNA, 21 nt, RNAi-antisense strand
auaguacacacaugagaacuu

SEQ ID NO: 13930 - DNA, 21 bp, Homo sapiens
catgtgtgtactattctatca

SEQ ID NO: 13931 - RNA, 21 nt, RNAi-sense strand
uguguguacuauucuaucauu

SEQ ID NO: 13932 - RNA, 21 nt, RNAi-antisense strand
ugauagaauaguacacacauu

SEQ ID NO: 13933 - DNA, 21 bp, Homo sapiens
cacacagagaacctcagtctg

SEQ ID NO: 13934 - RNA, 21 nt, RNAi-sense strand
cacagagaaccucagucuguu

SEQ ID NO: 13935 - RNA, 21 nt, RNAi-antisense strand
cagacugagguucucuguguu

SEQ ID NO: 13936 - DNA, 21 bp, Homo sapiens
cacagagaacctcagtctgta

SEQ ID NO: 13937 - RNA, 21 nt, RNAi-sense strand
cagagaaccucagucuguauu

SEQ ID NO: 13938 - RNA, 21 nt, RNAi-antisense strand
uacagacugagguucucuguu

SEQ ID NO: 13939 - DNA, 21 bp, Homo sapiens
cagagaacctcagtctgtaat

SEQ ID NO: 13940 - RNA, 21 nt, RNAi-sense strand
gagaaccucagucuguaauuu

SEQ ID NO: 13941 - RNA, 21 nt, RNAi-antisense strand
auuacagacugagguucucuu

SEQ ID NO: 13942 - DNA, 21 bp, Homo sapiens
cagtctgtaataacaatgagg

SEQ ID NO: 13943 - RNA, 21 nt, RNAi-sense strand
gucuguaauaacaaugagguu

SEQ ID NO: 13944 - RNA, 21 nt, RNAi-antisense strand
ccucauuguuauuacagacuu

SEQ ID NO: 13945 - DNA, 21 bp, Homo sapiens
caatgaggaatagccatggcg

SEQ ID NO: 13946 - RNA, 21 nt, RNAi-sense strand
augaggaauagccauggcguu

SEQ ID NO: 13947 - RNA, 21 nt, RNAi-antisense strand
cgccauggcuauuccucauuu

SEQ ID NO: 13948 - DNA, 21 bp, Homo sapiens
catggcgatctccagcaccaa

SEQ ID NO: 13949 - RNA, 21 nt, RNAi-sense strand
uggcgaucuccagcaccaauu

SEQ ID NO: 13950 - RNA, 21 nt, RNAi-antisense strand
uuggugcuggagaucgccauu

SEQ ID NO: 13951 - DNA, 21 bp, Homo sapiens
cagcaccaatctctccatgtt

SEQ ID NO: 13952 - RNA, 21 nt, RNAi-sense strand
gcaccaaucucuccauguuuu

SEQ ID NO: 13953 - RNA, 21 nt, RNAi-antisense strand
aacauggagagauuggugcuu

SEQ ID NO: 13954 - DNA, 21 bp, Homo sapiens
caaatagcgcctgctatagtg

SEQ ID NO: 13955 - RNA, 21 nt, RNAi-sense strand
aauagcgccugcuauaguguu

SEQ ID NO: 13956 - RNA, 21 nt, RNAi-antisense strand
cacuauagcaggcgcuauuuu

SEQ ID NO: 13957 - DNA, 21 bp, Homo sapiens
cagcctgcggcttctagcctt

SEQ ID NO: 13958 - RNA, 21 nt, RNAi-sense strand
gccugcggcuucuagccuuuu

SEQ ID NO: 13959 - RNA, 21 nt, RNAi-antisense strand
aaggcuagaagccgcaggcuu

SEQ ID NO: 13960 - DNA, 21 bp, Homo sapiens
cagataactgcctggaagcct

SEQ ID NO: 13961 - RNA, 21 nt, RNAi-sense strand
gauaacugccuggaagccuuu

SEQ ID NO: 13962 - RNA, 21 nt, RNAi-antisense strand
aggcuuccaggcaguuaucuu

SEQ ID NO: 13963 - DNA, 21 bp, Homo sapiens
cagtcttctttgctagttgaa

SEQ ID NO: 13964 - RNA, 21 nt, RNAi-sense strand
gucuucuuugcuaguugaauu

SEQ ID NO: 13965 - RNA, 21 nt, RNAi-antisense strand
uucaacuagcaaagaagacuu

SEQ ID NO: 13966 - DNA, 21 bp, Homo sapiens
gaatcaggaagaccagctcct

SEQ ID NO: 13967 - RNA, 21 nt, RNAi-sense strand
aucaggaagaccagcuccuuu

SEQ ID NO: 13968 - RNA, 21 nt, RNAi-antisense strand
aggagcuggucuuccugauuu

SEQ ID NO: 13969 - DNA, 21 bp, Homo sapiens
gaagaccagctcctcctactg

SEQ ID NO: 13970 - RNA, 21 nt, RNAi-sense strand
agaccagcuccuccuacuguu

SEQ ID NO: 13971 - RNA, 21 nt, RNAi-antisense strand
caguaggaggagcuggucuuu

SEQ ID NO: 13972 - DNA, 21 bp, Homo sapiens
gaccagctcctcctactgtct

SEQ ID NO: 13973 - RNA, 21 nt, RNAi-sense strand
ccagcuccuccuacugucuuu

SEQ ID NO: 13974 - RNA, 21 nt, RNAi-antisense strand
agacaguaggaggagcugguu

SEQ ID NO: 13975 - DNA, 21 bp, Homo sapiens
gatcagcgttccttgttgagt

SEQ ID NO: 13976 - RNA, 21 nt, RNAi-sense strand
ucagcguuccuuguugaguuu

SEQ ID NO: 13977 - RNA, 21 nt, RNAi-antisense strand
acucaacaaggaacgcugauu

SEQ ID NO: 13978 - DNA, 21 bp, Homo sapiens
gagaggaaggcatgctgttgg

SEQ ID NO: 13979 - RNA, 21 nt, RNAi-sense strand
gaggaaggcaugcuguugguu

SEQ ID NO: 13980 - RNA, 21 nt, RNAi-antisense strand
ccaacagcaugccuuccucuu

SEQ ID NO: 13981 - DNA, 21 bp, Homo sapiens
gaggaaggcatgctgttggct

SEQ ID NO: 13982 - RNA, 21 nt, RNAi-sense strand
ggaaggcaugcuguuggcuuu

SEQ ID NO: 13983 - RNA, 21 nt, RNAi-antisense strand
agccaacagcaugccuuccuu

SEQ ID NO: 13984 - DNA, 21 bp, Homo sapiens
gaaggcatgctgttggctcta

SEQ ID NO: 13985 - RNA, 21 nt, RNAi-sense strand
aggcaugcuguuggcucuauu

SEQ ID NO: 13986 - RNA, 21 nt, RNAi-antisense strand
uagagccaacagcaugccuuu

SEQ ID NO: 13987 - DNA, 21 bp, Homo sapiens
gaaatcttccaacttggaagg

SEQ ID NO: 13988 - RNA, 21 nt, RNAi-sense strand
aaucuuccaacuuggaagguu

SEQ ID NO: 13989 - RNA, 21 nt, RNAi-antisense strand
ccuuccaaguuggaagauuuu

SEQ ID NO: 13990 - DNA, 21 bp, Homo sapiens
gagaacaaagtcagtcaccag

SEQ ID NO: 13991 - RNA, 21 nt, RNAi-sense strand
gaacaaagucagucaccaguu

SEQ ID NO: 13992 - RNA, 21 nt, RNAi-antisense strand
cuggugacugacuuuguucuu

SEQ ID NO: 13993 - DNA, 21 bp, Homo sapiens
gaacaaagtcagtcaccaggc

SEQ ID NO: 13994 - RNA, 21 nt, RNAi-sense strand
acaaagucagucaccaggcuu

SEQ ID NO: 13995 - RNA, 21 nt, RNAi-antisense strand
gccuggugacugacuuuguuu

SEQ ID NO: 13996 - DNA, 21 bp, Homo sapiens
gaatcaggaatcagtcgagaa

SEQ ID NO: 13997 - RNA, 21 nt, RNAi-sense strand
aucaggaaucagucgagaauu

SEQ ID NO: 13998 - RNA, 21 nt, RNAi-antisense strand
uucucgacugauuccugauuu

SEQ ID NO: 13999 - DNA, 21 bp, Homo sapiens
gagccttaaatttatactgga

SEQ ID NO: 14000 - RNA, 21 nt, RNAi-sense strand
gccuuaaauuuauacuggauu

SEQ ID NO: 14001 - RNA, 21 nt, RNAi-antisense strand
uccaguauaaauuuaaggcuu

SEQ ID NO: 14002 - DNA, 21 bp, Homo sapiens
gaaactctttggcagtggaac

SEQ ID NO: 14003 - RNA, 21 nt, RNAi-sense strand
aacucuuuggcaguggaacuu

SEQ ID NO: 14004 - RNA, 21 nt, RNAi-antisense strand
guuccacugccaaagaguuuu

SEQ ID NO: 14005 - DNA, 21 bp, Homo sapiens
gaacaacacttgttgtcacag

SEQ ID NO: 14006 - RNA, 21 nt, RNAi-sense strand
acaacacuuguugucacaguu

SEQ ID NO: 14007 - RNA, 21 nt, RNAi-antisense strand
cugugacaacaaguguuguuu

SEQ ID NO: 14008 - DNA, 21 bp, Homo sapiens
gataaacaacttgatgcagat

SEQ ID NO: 14009 - RNA, 21 nt, RNAi-sense strand
uaaacaacuugaugcagauuu

SEQ ID NO: 14010 - RNA, 21 nt, RNAi-antisense strand
aucugcaucaaguuguuuauu

SEQ ID NO: 14011 - DNA, 21 bp, Homo sapiens
gaaggctggaacatatctttg

SEQ ID NO: 14012 - RNA, 21 nt, RNAi-sense strand
aggcuggaacauaucuuuguu

SEQ ID NO: 14013 - RNA, 21 nt, RNAi-antisense strand
caaagauauguuccagccuuu

SEQ ID NO: 14014 - DNA, 21 bp, Homo sapiens
gaacatatctttgtcttcttg

SEQ ID NO: 14015 - RNA, 21 nt, RNAi-sense strand
acauaucuuugucuucuuguu

SEQ ID NO: 14016 - RNA, 21 nt, RNAi-antisense strand
caagaagacaaagauauguuu

SEQ ID NO: 14017 - DNA, 21 bp, Homo sapiens
gaacaccatgaagactaacga

SEQ ID NO: 14018 - RNA, 21 nt, RNAi-sense strand
acaccaugaagacuaacgauu

SEQ ID NO: 14019 - RNA, 21 nt, RNAi-antisense strand
ucguuagucuucaugguguuu

SEQ ID NO: 14020 - DNA, 21 bp, Homo sapiens
gaagactaacgacacatacat

SEQ ID NO: 14021 - RNA, 21 nt, RNAi-sense strand
agacuaacgacacauacauuu

SEQ ID NO: 14022 - RNA, 21 nt, RNAi-antisense strand
auguaugugucguuagucuuu

SEQ ID NO: 14023 - DNA, 21 bp, Homo sapiens
gactaacgacacatacatgaa

SEQ ID NO: 14024 - RNA, 21 nt, RNAi-sense strand
cuaacgacacauacaugaauu

SEQ ID NO: 14025 - RNA, 21 nt, RNAi-antisense strand
uucauguaugugucguuaguu

SEQ ID NO: 14026 - DNA, 21 bp, Homo sapiens
gacacatacatgaaatttagc

SEQ ID NO: 14027 - RNA, 21 nt, RNAi-sense strand
cacauacaugaaauuuagcuu

SEQ ID NO: 14028 - RNA, 21 nt, RNAi-antisense strand
gcuaaauuucauguauguguu

SEQ ID NO: 14029 - DNA, 21 bp, Homo sapiens
gaaatttagctggttaacggt

SEQ ID NO: 14030 - RNA, 21 nt, RNAi-sense strand
aauuuagcugguuaacgguuu

SEQ ID NO: 14031 - RNA, 21 nt, RNAi-antisense strand
accguuaaccagcuaaauuuu

SEQ ID NO: 14032 - DNA, 21 bp, Homo sapiens
gaagagtcactggacaaagaa

SEQ ID NO: 14033 - RNA, 21 nt, RNAi-sense strand
agagucacuggacaaagaauu

SEQ ID NO: 14034 - RNA, 21 nt, RNAi-antisense strand
uucuuuguccagugacucuuu

SEQ ID NO: 14035 - DNA, 21 bp, Homo sapiens
gagtcactggacaaagaacac

SEQ ID NO: 14036 - RNA, 21 nt, RNAi-sense strand
gucacuggacaaagaacacuu

SEQ ID NO: 14037 - RNA, 21 nt, RNAi-antisense strand
guguucuuuguccagugacuu

SEQ ID NO: 14038 - DNA, 21 bp, Homo sapiens
gacaaagaacacagatgtatc

SEQ ID NO: 14039 - RNA, 21 nt, RNAi-sense strand
caaagaacacagauguaucuu

SEQ ID NO: 14040 - RNA, 21 nt, RNAi-antisense strand
gauacaucuguguucuuuguu

SEQ ID NO: 14041 - DNA, 21 bp, Homo sapiens
gaacacagatgtatcgtcaga

SEQ ID NO: 14042 - RNA, 21 nt, RNAi-sense strand
acacagauguaucgucagauu

SEQ ID NO: 14043 - RNA, 21 nt, RNAi-antisense strand
ucugacgauacaucuguguuu

SEQ ID NO: 14044 - DNA, 21 bp, Homo sapiens
gatgtatcgtcagacatgaga

SEQ ID NO: 14045 - RNA, 21 nt, RNAi-sense strand
uguaucgucagacaugagauu

SEQ ID NO: 14046 - RNA, 21 nt, RNAi-antisense strand
ucucaugucugacgauacauu

SEQ ID NO: 14047 - DNA, 21 bp, Homo sapiens
gacagatgtcaccacagtgga

SEQ ID NO: 14048 - RNA, 21 nt, RNAi-sense strand
cagaugucaccacaguggauu

SEQ ID NO: 14049 - RNA, 21 nt, RNAi-antisense strand
uccacuguggugacaucuguu

SEQ ID NO: 14050 - DNA, 21 bp, Homo sapiens
gatgcaaatgatgtcaccaca

SEQ ID NO: 14051 - RNA, 21 nt, RNAi-sense strand
ugcaaaugaugucaccacauu

SEQ ID NO: 14052 - RNA, 21 nt, RNAi-antisense strand
uguggugacaucauuugcauu

SEQ ID NO: 14053 - DNA, 21 bp, Homo sapiens
gatgcaaatgatgtcatcaca

SEQ ID NO: 14054 - RNA, 21 nt, RNAi-sense strand
ugcaaaugaugucaucacauu

SEQ ID NO: 14055 - RNA, 21 nt, RNAi-antisense strand
ugugaugacaucauuugcauu

SEQ ID NO: 14056 - DNA, 21 bp, Homo sapiens
gatgcaaatgatacactactg

SEQ ID NO: 14057 - RNA, 21 nt, RNAi-sense strand
ugcaaaugauacacuacuguu

SEQ ID NO: 14058 - RNA, 21 nt, RNAi-antisense strand
caguaguguaucauuugcauu

SEQ ID NO: 14059 - DNA, 21 bp, Homo sapiens
gatacactactgctgcagctc

SEQ ID NO: 14060 - RNA, 21 nt, RNAi-sense strand
uacacuacugcugcagcucuu

SEQ ID NO: 14061 - RNA, 21 nt, RNAi-antisense strand
gagcugcagcaguaguguauu

SEQ ID NO: 14062 - DNA, 21 bp, Homo sapiens
gaagaacggctttctgctgca

SEQ ID NO: 14063 - RNA, 21 nt, RNAi-sense strand
agaacggcuuucugcugcauu

SEQ ID NO: 14064 - RNA, 21 nt, RNAi-antisense strand
ugcagcagaaagccguucuuu

SEQ ID NO: 14065 - DNA, 21 bp, Homo sapiens
gaacggctttctgctgcaatg

SEQ ID NO: 14066 - RNA, 21 nt, RNAi-sense strand
acggcuuucugcugcaauguu

SEQ ID NO: 14067 - RNA, 21 nt, RNAi-antisense strand
cauugcagcagaaagccguuu

SEQ ID NO: 14068 - DNA, 21 bp, Homo sapiens
gagagaaatcataacagacgg

SEQ ID NO: 14069 - RNA, 21 nt, RNAi-sense strand
gagaaaucauaacagacgguu

SEQ ID NO: 14070 - RNA, 21 nt, RNAi-antisense strand
ccgucuguuaugauuucucuu

SEQ ID NO: 14071 - DNA, 21 bp, Homo sapiens
gagaaatcataacagacggtg

SEQ ID NO: 14072 - RNA, 21 nt, RNAi-sense strand
gaaaucauaacagacgguguu

SEQ ID NO: 14073 - RNA, 21 nt, RNAi-antisense strand
caccgucuguuaugauuucuu

SEQ ID NO: 14074 - DNA, 21 bp, Homo sapiens
gaaatcataacagacggtggc

SEQ ID NO: 14075 - RNA, 21 nt, RNAi-sense strand
aaucauaacagacgguggcuu

SEQ ID NO: 14076 - RNA, 21 nt, RNAi-antisense strand
gccaccgucuguuaugauuuu

SEQ ID NO: 14077 - DNA, 21 bp, Homo sapiens
gaagcgtcttctgaggatcta

SEQ ID NO: 14078 - RNA, 21 nt, RNAi-sense strand
agcgucuucugaggaucuauu

SEQ ID NO: 14079 - RNA, 21 nt, RNAi-antisense strand
uagauccucagaagacgcuuu

SEQ ID NO: 14080 - DNA, 21 bp, Homo sapiens
gagaacctcagtctgtaataa

SEQ ID NO: 14081 - RNA, 21 nt, RNAi-sense strand
gaaccucagucuguaauaauu

SEQ ID NO: 14082 - RNA, 21 nt, RNAi-antisense strand
uuauuacagacugagguucuu

SEQ ID NO: 14083 - DNA, 21 bp, Homo sapiens
gaacctcagtctgtaataaca

SEQ ID NO: 14084 - RNA, 21 nt, RNAi-sense strand
accucagucuguaauaacauu

SEQ ID NO: 14085 - RNA, 21 nt, RNAi-antisense strand
uguuauuacagacugagguuu

SEQ ID NO: 14086 - DNA, 21 bp, Homo sapiens
gaggaatagccatggcgatct

SEQ ID NO: 14087 - RNA, 21 nt, RNAi-sense strand
ggaauagccauggcgaucuuu

SEQ ID NO: 14088 - RNA, 21 nt, RNAi-antisense strand
agaucgccauggcuauuccuu

SEQ ID NO: 14089 - DNA, 21 bp, Homo sapiens
gaatagccatggcgatctcca

SEQ ID NO: 14090 - RNA, 21 nt, RNAi-sense strand
auagccauggcgaucuccauu

SEQ ID NO: 14091 - RNA, 21 nt, RNAi-antisense strand
uggagaucgccauggcuauuu

SEQ ID NO: 14092 - DNA, 21 bp, Homo sapiens
gatctccagcaccaatctctc

SEQ ID NO: 14093 - RNA, 21 nt, RNAi-sense strand
ucuccagcaccaaucucucuu

SEQ ID NO: 14094 - RNA, 21 nt, RNAi-antisense strand
gagagauuggugcuggagauu

SEQ ID NO: 14095 - DNA, 21 bp, Homo sapiens
gataactgcctggaagccttt

SEQ ID NO: 14096 - RNA, 21 nt, RNAi-sense strand
uaacugccuggaagccuuuuu

SEQ ID NO: 14097 - RNA, 21 nt, RNAi-antisense strand
aaaggcuuccaggcaguuauu

SEQ ID NO: 14098 - DNA, 21 bp, Homo sapiens
gaagcagtcttctttgctagt

SEQ ID NO: 14099 - RNA, 21 nt, RNAi-sense strand
agcagucuucuuugcuaguuu

SEQ ID NO: 14100 - RNA, 21 nt, RNAi-antisense strand
acuagcaaagaagacugcuuu

SEQ ID NO: 14101 - DNA, 21 bp, Homo sapiens
tagctctgcttctagctttcc

SEQ ID NO: 14102 - RNA, 21 nt, RNAi-sense strand
gcucugcuucuagcuuuccuu

SEQ ID NO: 14103 - RNA, 21 nt, RNAi-antisense strand
ggaaagcuagaagcagagcuu

SEQ ID NO: 14104 - DNA, 21 bp, Homo sapiens
tagctttcctgcctcctgcca

SEQ ID NO: 14105 - RNA, 21 nt, RNAi-sense strand
gcuuuccugccuccugccauu

SEQ ID NO: 14106 - RNA, 21 nt, RNAi-antisense strand
uggcaggaggcaggaaagcuu

SEQ ID NO: 14107 - DNA, 21 bp, Homo sapiens
taatcacttgtgatcttcctg

SEQ ID NO: 14108 - RNA, 21 nt, RNAi-sense strand
aucacuugugaucuuccuguu

SEQ ID NO: 14109 - RNA, 21 nt, RNAi-antisense strand
caggaagaucacaagugauuu

SEQ ID NO: 14110 - DNA, 21 bp, Homo sapiens
tactatgactcctacaactcc

SEQ ID NO: 14111 - RNA, 21 nt, RNAi-sense strand
cuaugacuccuacaacuccuu

SEQ ID NO: 14112 - RNA, 21 nt, RNAi-antisense strand
ggaguuguaggagucauaguu

SEQ ID NO: 14113 - DNA, 21 bp, Homo sapiens
tatgactcctacaactccagg

SEQ ID NO: 14114 - RNA, 21 nt, RNAi-sense strand
ugacuccuacaacuccagguu

SEQ ID NO: 14115 - RNA, 21 nt, RNAi-antisense strand
ccuggaguuguaggagucauu

SEQ ID NO: 14116 - DNA, 21 bp, Homo sapiens
tatcatacttatgcaagcaca

SEQ ID NO: 14117 - RNA, 21 nt, RNAi-sense strand
ucauacuuaugcaagcacauu

SEQ ID NO: 14118 - RNA, 21 nt, RNAi-antisense strand
ugugcuugcauaaguaugauu

SEQ ID NO: 14119 - DNA, 21 bp, Homo sapiens
tattactgtgccacctggaag

SEQ ID NO: 14120 - RNA, 21 nt, RNAi-sense strand
uuacugugccaccuggaaguu

SEQ ID NO: 14121 - RNA, 21 nt, RNAi-antisense strand
cuuccagguggcacaguaauu

SEQ ID NO: 14122 - DNA, 21 bp, Homo sapiens
tactgtgccacctggaaggat

SEQ ID NO: 14123 - RNA, 21 nt, RNAi-sense strand
cugugccaccuggaaggauuu

SEQ ID NO: 14124 - RNA, 21 nt, RNAi-antisense strand
auccuuccagguggcacaguu

SEQ ID NO: 14125 - DNA, 21 bp, Homo sapiens
tataagaaactctttggcagt

SEQ ID NO: 14126 - RNA, 21 nt, RNAi-sense strand
uaagaaacucuuuggcaguuu

SEQ ID NO: 14127 - RNA, 21 nt, RNAi-antisense strand
acugccaaagaguuucuuauu

SEQ ID NO: 14128 - DNA, 21 bp, Homo sapiens
taagaaactctttggcagtgg

SEQ ID NO: 14129 - RNA, 21 nt, RNAi-sense strand
agaaacucuuuggcagugguu

SEQ ID NO: 14130 - RNA, 21 nt, RNAi-antisense strand
ccacugccaaagaguuucuuu

SEQ ID NO: 14131 - DNA, 21 bp, Homo sapiens
taaacaacttgatgcagatgt

SEQ ID NO: 14132 - RNA, 21 nt, RNAi-sense strand
aacaacuugaugcagauguuu

SEQ ID NO: 14133 - RNA, 21 nt, RNAi-antisense strand
acaucugcaucaaguuguuuu

SEQ ID NO: 14134 - DNA, 21 bp, Homo sapiens
tagctggttaacggtgccaga

SEQ ID NO: 14135 - RNA, 21 nt, RNAi-sense strand
gcugguuaacggugccagauu

SEQ ID NO: 14136 - RNA, 21 nt, RNAi-antisense strand
ucuggcaccguuaaccagcuu

SEQ ID NO: 14137 - DNA, 21 bp, Homo sapiens
taacggtgccagaagagtcac

SEQ ID NO: 14138 - RNA, 21 nt, RNAi-sense strand
acggugccagaagagucacuu

SEQ ID NO: 14139 - RNA, 21 nt, RNAi-antisense strand
gugacucuucuggcaccguuu

SEQ ID NO: 14140 - DNA, 21 bp, Homo sapiens
tatcgtcagacatgagaataa

SEQ ID NO: 14141 - RNA, 21 nt, RNAi-sense strand
ucgucagacaugagaauaauu

SEQ ID NO: 14142 - RNA, 21 nt, RNAi-antisense strand
uuauucucaugucugacgauu

SEQ ID NO: 14143 - DNA, 21 bp, Homo sapiens
tatctttcctccaataaagac

SEQ ID NO: 14144 - RNA, 21 nt, RNAi-sense strand
ucuuuccuccaauaaagacuu

SEQ ID NO: 14145 - RNA, 21 nt, RNAi-antisense strand
gucuuuauuggaggaaagauu

SEQ ID NO: 14146 - DNA, 21 bp, Homo sapiens
taaagacagatgtcaccacag

SEQ ID NO: 14147 - RNA, 21 nt, RNAi-sense strand
aagacagaugucaccacaguu

SEQ ID NO: 14148 - RNA, 21 nt, RNAi-antisense strand
cuguggugacaucugucuuuu

SEQ ID NO: 14149 - DNA, 21 bp, Homo sapiens
tacactactgctgcagctcac

SEQ ID NO: 14150 - RNA, 21 nt, RNAi-sense strand
cacuacugcugcagcucacuu

SEQ ID NO: 14151 - RNA, 21 nt, RNAi-antisense strand
gugagcugcagcaguaguguu

SEQ ID NO: 14152 - DNA, 21 bp, Homo sapiens
tactgctgcagctcacaaaca

SEQ ID NO: 14153 - RNA, 21 nt, RNAi-sense strand
cugcugcagcucacaaacauu

SEQ ID NO: 14154 - RNA, 21 nt, RNAi-antisense strand
uguuugugagcugcagcaguu

SEQ ID NO: 14155 - DNA, 21 bp, Homo sapiens
tattacatgtacctcctcctg

SEQ ID NO: 14156 - RNA, 21 nt, RNAi-sense strand
uuacauguaccuccuccuguu

SEQ ID NO: 14157 - RNA, 21 nt, RNAi-antisense strand
caggaggagguacauguaauu

SEQ ID NO: 14158 - DNA, 21 bp, Homo sapiens
tacatgtacctcctcctgctc

SEQ ID NO: 14159 - RNA, 21 nt, RNAi-sense strand
cauguaccuccuccugcucuu

SEQ ID NO: 14160 - RNA, 21 nt, RNAi-antisense strand
gagcaggaggagguacauguu

SEQ ID NO: 14161 - DNA, 21 bp, Homo sapiens
tacctcctcctgctcctcaag

SEQ ID NO: 14162 - RNA, 21 nt, RNAi-sense strand
ccuccuccugcuccucaaguu

SEQ ID NO: 14163 - RNA, 21 nt, RNAi-antisense strand
cuugaggagcaggaggagguu

SEQ ID NO: 14164 - DNA, 21 bp, Homo sapiens
taacagacggtggcacaagga

SEQ ID NO: 14165 - RNA, 21 nt, RNAi-sense strand
acagacgguggcacaaggauu

SEQ ID NO: 14166 - RNA, 21 nt, RNAi-antisense strand
uccuugugccaccgucuguuu

SEQ ID NO: 14167 - DNA, 21 bp, Homo sapiens
tagaagcgtcttctgaggatc

SEQ ID NO: 14168 - RNA, 21 nt, RNAi-sense strand
gaagcgucuucugaggaucuu

SEQ ID NO: 14169 - RNA, 21 nt, RNAi-antisense strand
gauccucagaagacgcuucuu

SEQ ID NO: 14170 - DNA, 21 bp, Homo sapiens
taataacaatgaggaatagcc

SEQ ID NO: 14171 - RNA, 21 nt, RNAi-sense strand
auaacaaugaggaauagccuu

SEQ ID NO: 14172 - RNA, 21 nt, RNAi-antisense strand
ggcuauuccucauuguuauuu

SEQ ID NO: 14173 - DNA, 21 bp, Homo sapiens
taacaatgaggaatagccatg

SEQ ID NO: 14174 - RNA, 21 nt, RNAi-sense strand
acaaugaggaauagccauguu

SEQ ID NO: 14175 - RNA, 21 nt, RNAi-antisense strand
cauggcuauuccucauuguuu

SEQ ID NO: 14176 - DNA, 21 bp, Homo sapiens
tagccatggcgatctccagca

SEQ ID NO: 14177 - RNA, 21 nt, RNAi-sense strand
gccauggcgaucuccagcauu

SEQ ID NO: 14178 - RNA, 21 nt, RNAi-antisense strand
ugcuggagaucgccauggcuu

SEQ ID NO: 14179 - DNA, 21 bp, Homo sapiens
tagcgcctgctatagtgtaga

SEQ ID NO: 14180 - RNA, 21 nt, RNAi-sense strand
gcgccugcuauaguguagauu

SEQ ID NO: 14181 - RNA, 21 nt, RNAi-antisense strand
ucuacacuauagcaggcgcuu

SEQ ID NO: 14182 - DNA, 21 bp, Homo sapiens
tatagtgtagacagcctgcgg

SEQ ID NO: 14183 - RNA, 21 nt, RNAi-sense strand
uaguguagacagccugcgguu

SEQ ID NO: 14184 - RNA, 21 nt, RNAi-antisense strand
ccgcaggcugucuacacuauu

SEQ ID NO: 14185 - DNA, 21 bp, Homo sapiens
tagtgtagacagcctgcggct

SEQ ID NO: 14186 - RNA, 21 nt, RNAi-sense strand
guguagacagccugcggcuuu

SEQ ID NO: 14187 - RNA, 21 nt, RNAi-antisense strand
agccgcaggcugucuacacuu

SEQ ID NO: 14188 - DNA, 21 bp, Homo sapiens
tagacagcctgcggcttctag

SEQ ID NO: 14189 - RNA, 21 nt, RNAi-sense strand
gacagccugcggcuucuaguu

SEQ ID NO: 14190 - RNA, 21 nt, RNAi-antisense strand
cuagaagccgcaggcugucuu

SEQ ID NO: 14191 - DNA, 21 bp, Homo sapiens
taatcagataactgcctggaa

SEQ ID NO: 14192 - RNA, 21 nt, RNAi-sense strand
aucagauaacugccuggaauu

SEQ ID NO: 14193 - RNA, 21 nt, RNAi-antisense strand
uuccaggcaguuaucugauuu

SEQ ID NO: 14194 - DNA, 21 bp, Homo sapiens
taactgcctggaagcctttca

SEQ ID NO: 14195 - RNA, 21 nt, RNAi-sense strand
acugccuggaagccuuucauu

SEQ ID NO: 14196 - RNA, 21 nt, RNAi-antisense strand
ugaaaggcuuccaggcaguuu

SEQ ID NO: 14197 - DNA, 21 bp, Homo sapiens
tagttgaattatgtggtgtgt

SEQ ID NO: 14198 - RNA, 21 nt, RNAi-sense strand
guugaauuaugugguguguuu

SEQ ID NO: 14199 - RNA, 21 nt, RNAi-antisense strand
acacaccacauaauucaacuu

SEQ ID NO: 14200 - DNA, 21 bp, Homo sapiens
aatcaggaatcagtcgagaaa

SEQ ID NO: 14201 - RNA, 21 nt, RNAi-sense strand
ucaggaaucagucgagaaauu

SEQ ID NO: 14202 - RNA, 21 nt, RNAi-antisense strand
uuucucgacugauuccugauu

SEQ ID NO: 14203 - DNA, 21 bp, Homo sapiens
aaatctaattgaacgtgactc

SEQ ID NO: 14204 - RNA, 21 nt, RNAi-sense strand
aucuaauugaacgugacucuu

SEQ ID NO: 14205 - RNA, 21 nt, RNAi-antisense strand
gagucacguucaauuagauuu

SEQ ID NO: 14206 - DNA, 21 bp, Homo sapiens
aatctaattgaacgtgactct

SEQ ID NO: 14207 - RNA, 21 nt, RNAi-sense strand
ucuaauugaacgugacucuuu

SEQ ID NO: 14208 - RNA, 21 nt, RNAi-antisense strand
agagucacguucaauuagauu

SEQ ID NO: 14209 - DNA, 21 bp, Homo sapiens
aacacttgttgtcacagataa

SEQ ID NO: 14210 - RNA, 21 nt, RNAi-sense strand
cacuuguugucacagauaauu

SEQ ID NO: 14211 - RNA, 21 nt, RNAi-antisense strand
uuaucugugacaacaaguguu

SEQ ID NO: 14212 - DNA, 21 bp, Homo sapiens
caacacttgttgtcacagata

SEQ ID NO: 14213 - RNA, 21 nt, RNAi-sense strand
acacuuguugucacagauauu

SEQ ID NO: 14214 - RNA, 21 nt, RNAi-antisense strand
uaucugugacaacaaguguuu

SEQ ID NO: 14215 - DNA, 21 bp, Homo sapiens
gaatcaggaatcagtcgagaa

SEQ ID NO: 14216 - RNA, 21 nt, RNAi-sense strand
aucaggaaucagucgagaauu

SEQ ID NO: 14217 - RNA, 21 nt, RNAi-antisense strand
uucucgacugauuccugauuu

SEQ ID NO: 14218 - DNA, 21 bp, Homo sapiens
aagatcttcaagaagaagacc

SEQ ID NO: 14219 - RNA, 21 nt, RNAi-sense strand
gaucuucaagaagaagaccuu

SEQ ID NO: 14220 - RNA, 21 nt, RNAi-antisense strand
ggucuucuucuugaagaucuu

SEQ ID NO: 14221 - DNA, 21 bp, Homo sapiens
aagaagaagacctgcacgacg

SEQ ID NO: 14222 - RNA, 21 nt, RNAi-sense strand
gaagaagaccugcacgacguu

SEQ ID NO: 14223 - RNA, 21 nt, RNAi-antisense strand
cgucgugcaggucuucuucuu

SEQ ID NO: 14224 - DNA, 21 bp, Homo sapiens
aagaagacctgcacgacgttc

SEQ ID NO: 14225 - RNA, 21 nt, RNAi-sense strand
gaagaccugcacgacguucuu

SEQ ID NO: 14226 - RNA, 21 nt, RNAi-antisense strand
gaacgucgugcaggucuucuu

SEQ ID NO: 14227 - DNA, 21 bp, Homo sapiens
aagacctgcacgacgttcata

SEQ ID NO: 14228 - RNA, 21 nt, RNAi-sense strand
gaccugcacgacguucauauu

SEQ ID NO: 14229 - RNA, 21 nt, RNAi-antisense strand
uaugaacgucgugcaggucuu

SEQ ID NO: 14230 - DNA, 21 bp, Homo sapiens
aagcacagcaatttcctccgg

SEQ ID NO: 14231 - RNA, 21 nt, RNAi-sense strand
gcacagcaauuuccuccgguu

SEQ ID NO: 14232 - RNA, 21 nt, RNAi-antisense strand
ccggaggaaauugcugugcuu

SEQ ID NO: 14233 - DNA, 21 bp, Homo sapiens
aatttcctccggctctctgac

SEQ ID NO: 14234 - RNA, 21 nt, RNAi-sense strand
uuuccuccggcucucugacuu

SEQ ID NO: 14235 - RNA, 21 nt, RNAi-antisense strand
gucagagagccggaggaaauu

SEQ ID NO: 14236 - DNA, 21 bp, Homo sapiens
aacggatccagctgcagttta

SEQ ID NO: 14237 - RNA, 21 nt, RNAi-sense strand
cggauccagcugcaguuuauu

SEQ ID NO: 14238 - RNA, 21 nt, RNAi-antisense strand
uaaacugcagcuggauccguu

SEQ ID NO: 14239 - DNA, 21 bp, Homo sapiens
aacctggtggtgtcagtgctg

SEQ ID NO: 14240 - RNA, 21 nt, RNAi-sense strand
ccugguggugucagugcuguu

SEQ ID NO: 14241 - RNA, 21 nt, RNAi-antisense strand
cagcacugacaccaccagguu

SEQ ID NO: 14242 - DNA, 21 bp, Homo sapiens
aactactcggccttcttcctg

SEQ ID NO: 14243 - RNA, 21 nt, RNAi-sense strand
cuacucggccuucuuccuguu

SEQ ID NO: 14244 - RNA, 21 nt, RNAi-antisense strand
caggaagaaggccgaguaguu

SEQ ID NO: 14245 - DNA, 21 bp, Homo sapiens
aagatgttgacgcgaatagag

SEQ ID NO: 14246 - RNA, 21 nt, RNAi-sense strand
gauguugacgcgaauagaguu

SEQ ID NO: 14247 - RNA, 21 nt, RNAi-antisense strand
cucuauucgcgucaacaucuu

SEQ ID NO: 14248 - DNA, 21 bp, Homo sapiens
aaggagctcctgacagtctat

SEQ ID NO: 14249 - RNA, 21 nt, RNAi-sense strand
ggagcuccugacagucuauuu

SEQ ID NO: 14250 - RNA, 21 nt, RNAi-antisense strand
auagacugucaggagcuccuu

SEQ ID NO: 14251 - DNA, 21 bp, Homo sapiens
aatggcggtccttccatctcg

SEQ ID NO: 14252 - RNA, 21 nt, RNAi-sense strand
uggcgguccuuccaucucguu

SEQ ID NO: 14253 - RNA, 21 nt, RNAi-antisense strand
cgagauggaaggaccgccauu

SEQ ID NO: 14254 - DNA, 21 bp, Homo sapiens
aatgaccggcctgagttcgtg

SEQ ID NO: 14255 - RNA, 21 nt, RNAi-sense strand
ugaccggccugaguucguguu

SEQ ID NO: 14256 - RNA, 21 nt, RNAi-antisense strand
cacgaacucaggccggucauu

SEQ ID NO: 14257 - DNA, 21 bp, Homo sapiens
aactcgctcatccgcaacctt

SEQ ID NO: 14258 - RNA, 21 nt, RNAi-sense strand
cucgcucauccgcaaccuuuu

SEQ ID NO: 14259 - RNA, 21 nt, RNAi-antisense strand
aagguugcggaugagcgaguu

SEQ ID NO: 14260 - DNA, 21 bp, Homo sapiens
aatgcagtttcctcagctctt

SEQ ID NO: 14261 - RNA, 21 nt, RNAi-sense strand
ugcaguuuccucagcucuuuu

SEQ ID NO: 14262 - RNA, 21 nt, RNAi-antisense strand
aagagcugaggaaacugcauu

SEQ ID NO: 14263 - DNA, 21 bp, Homo sapiens
aaagacctggcgttcaagttt

SEQ ID NO: 14264 - RNA, 21 nt, RNAi-sense strand
agaccuggcguucaaguuuuu

SEQ ID NO: 14265 - RNA, 21 nt, RNAi-antisense strand
aaacuugaacgccaggucuuu

SEQ ID NO: 14266 - DNA, 21 bp, Homo sapiens
aagacctggcgttcaagtttg

SEQ ID NO: 14267 - RNA, 21 nt, RNAi-sense strand
gaccuggcguucaaguuuguu

SEQ ID NO: 14268 - RNA, 21 nt, RNAi-antisense strand
caaacuugaacgccaggucuu

SEQ ID NO: 14269 - DNA, 21 bp, Homo sapiens
aacgtggtcagctacctgctg

SEQ ID NO: 14270 - RNA, 21 nt, RNAi-sense strand
cguggucagcuaccugcuguu

SEQ ID NO: 14271 - RNA, 21 nt, RNAi-antisense strand
cagcagguagcugaccacguu

SEQ ID NO: 14272 - DNA, 21 bp, Homo sapiens
aaccagtgcgacctagtggct

SEQ ID NO: 14273 - RNA, 21 nt, RNAi-sense strand
ccagugcgaccuaguggcuuu

SEQ ID NO: 14274 - RNA, 21 nt, RNAi-antisense strand
agccacuaggucgcacugguu

SEQ ID NO: 14275 - DNA, 21 bp, Homo sapiens
aagatcgtcatcgtgagcaag

SEQ ID NO: 14276 - RNA, 21 nt, RNAi-sense strand
gaucgucaucgugagcaaguu

SEQ ID NO: 14277 - RNA, 21 nt, RNAi-antisense strand
cuugcucacgaugacgaucuu

SEQ ID NO: 14278 - DNA, 21 bp, Homo sapiens
aagatgatgaaggacgtgttc

SEQ ID NO: 14279 - RNA, 21 nt, RNAi-sense strand
gaugaugaaggacguguucuu

SEQ ID NO: 14280 - RNA, 21 nt, RNAi-antisense strand
gaacacguccuucaucaucuu

SEQ ID NO: 14281 - DNA, 21 bp, Homo sapiens
aaggacgtgttcttcttcctc

SEQ ID NO: 14282 - RNA, 21 nt, RNAi-sense strand
ggacguguucuucuuccucuu

SEQ ID NO: 14283 - RNA, 21 nt, RNAi-antisense strand
gaggaagaagaacacguccuu

SEQ ID NO: 14284 - DNA, 21 bp, Homo sapiens
aactggctggtggtgctgctc

SEQ ID NO: 14285 - RNA, 21 nt, RNAi-sense strand
cuggcugguggugcugcucuu

SEQ ID NO: 14286 - RNA, 21 nt, RNAi-antisense strand
gagcagcaccaccagccaguu

SEQ ID NO: 14287 - DNA, 21 bp, Homo sapiens
aacatcctgctggtcaacttg

SEQ ID NO: 14288 - RNA, 21 nt, RNAi-sense strand
cauccugcuggucaacuuguu

SEQ ID NO: 14289 - RNA, 21 nt, RNAi-antisense strand
caaguugaccagcaggauguu

SEQ ID NO: 14290 - DNA, 21 bp, Homo sapiens
aacttgctcattgccatgttc

SEQ ID NO: 14291 - RNA, 21 nt, RNAi-sense strand
cuugcucauugccauguucuu

SEQ ID NO: 14292 - RNA, 21 nt, RNAi-antisense strand
gaacauggcaaugagcaaguu

SEQ ID NO: 14293 - DNA, 21 bp, Homo sapiens
aacagcgatctctactggaag

SEQ ID NO: 14294 - RNA, 21 nt, RNAi-sense strand
cagcgaucucuacuggaaguu

SEQ ID NO: 14295 - RNA, 21 nt, RNAi-antisense strand
cuuccaguagagaucgcuguu

SEQ ID NO: 14296 - DNA, 21 bp, Homo sapiens
aaggaagccgagcggaagctg

SEQ ID NO: 14297 - RNA, 21 nt, RNAi-sense strand
ggaagccgagcggaagcuguu

SEQ ID NO: 14298 - RNA, 21 nt, RNAi-antisense strand
cagcuuccgcucggcuuccuu

SEQ ID NO: 14299 - DNA, 21 bp, Homo sapiens
aagccgagcggaagctgctaa

SEQ ID NO: 14300 - RNA, 21 nt, RNAi-sense strand
gccgagcggaagcugcuaauu

SEQ ID NO: 14301 - RNA, 21 nt, RNAi-antisense strand
uuagcagcuuccgcucggcuu

SEQ ID NO: 14302 - DNA, 21 bp, Homo sapiens
aatcggtgcataaggagaact

SEQ ID NO: 14303 - RNA, 21 nt, RNAi-sense strand
ucggugcauaaggagaacuuu

SEQ ID NO: 14304 - RNA, 21 nt, RNAi-antisense strand
aguucuccuuaugcaccgauu

SEQ ID NO: 14305 - DNA, 21 bp, Homo sapiens
aaggagaactttctgctggca

SEQ ID NO: 14306 - RNA, 21 nt, RNAi-sense strand
ggagaacuuucugcuggcauu

SEQ ID NO: 14307 - RNA, 21 nt, RNAi-antisense strand
ugccagcagaaaguucuccuu

SEQ ID NO: 14308 - DNA, 21 bp, Homo sapiens
aactttctgctggcacgcgct

SEQ ID NO: 14309 - RNA, 21 nt, RNAi-sense strand
cuuucugcuggcacgcgcuuu

SEQ ID NO: 14310 - RNA, 21 nt, RNAi-antisense strand
agcgcgugccagcagaaaguu

SEQ ID NO: 14311 - DNA, 21 bp, Homo sapiens
aaggtggacttggcactgaaa

SEQ ID NO: 14312 - RNA, 21 nt, RNAi-sense strand
gguggacuuggcacugaaauu

SEQ ID NO: 14313 - RNA, 21 nt, RNAi-antisense strand
uuucagugccaaguccaccuu

SEQ ID NO: 14314 - DNA, 21 bp, Homo sapiens
aacagcgcctgaaagtgctgg

SEQ ID NO: 14315 - RNA, 21 nt, RNAi-sense strand
cagcgccugaaagugcugguu

SEQ ID NO: 14316 - RNA, 21 nt, RNAi-antisense strand
ccagcacuuucaggcgcuguu

SEQ ID NO: 14317 - DNA, 21 bp, Homo sapiens
aaataaagccatttcagagga

SEQ ID NO: 14318 - RNA, 21 nt, RNAi-sense strand
auaaagccauuucagaggauu

SEQ ID NO: 14319 - RNA, 21 nt, RNAi-antisense strand
uccucugaaauggcuuuauuu

SEQ ID NO: 14320 - DNA, 21 bp, Homo sapiens
aataaagccatttcagaggaa

SEQ ID NO: 14321 - RNA, 21 nt, RNAi-sense strand
uaaagccauuucagaggaauu

SEQ ID NO: 14322 - RNA, 21 nt, RNAi-antisense strand
uuccucugaaauggcuuuauu

SEQ ID NO: 14323 - DNA, 21 bp, Homo sapiens
cagcatggtggtgccggagaa

SEQ ID NO: 14324 - RNA, 21 nt, RNAi-sense strand
gcaugguggugccggagaauu

SEQ ID NO: 14325 - RNA, 21 nt, RNAi-antisense strand
uucuccggcaccaccaugcuu

SEQ ID NO: 14326 - DNA, 21 bp, Homo sapiens
catggtggtgccggagaagga

SEQ ID NO: 14327 - RNA, 21 nt, RNAi-sense strand
ugguggugccggagaaggauu

SEQ ID NO: 14328 - RNA, 21 nt, RNAi-antisense strand
uccuucuccggcaccaccauu

SEQ ID NO: 14329 - DNA, 21 bp, Homo sapiens
caagatcttcaagaagaagac

SEQ ID NO: 14330 - RNA, 21 nt, RNAi-sense strand
agaucuucaagaagaagacuu

SEQ ID NO: 14331 - RNA, 21 nt, RNAi-antisense strand
gucuucuucuugaagaucuuu

SEQ ID NO: 14332 - DNA, 21 bp, Homo sapiens
caagaagaagacctgcacgac

SEQ ID NO: 14333 - RNA, 21 nt, RNAi-sense strand
agaagaagaccugcacgacuu

SEQ ID NO: 14334 - RNA, 21 nt, RNAi-antisense strand
gucgugcaggucuucuucuuu

SEQ ID NO: 14335 - DNA, 21 bp, Homo sapiens
cacgacgttcatagttgactc

SEQ ID NO: 14336 - RNA, 21 nt, RNAi-sense strand
cgacguucauaguugacucuu

SEQ ID NO: 14337 - RNA, 21 nt, RNAi-antisense strand
gagucaacuaugaacgucguu

SEQ ID NO: 14338 - DNA, 21 bp, Homo sapiens
catagttgactccacagatcc

SEQ ID NO: 14339 - RNA, 21 nt, RNAi-sense strand
uaguugacuccacagauccuu

SEQ ID NO: 14340 - RNA, 21 nt, RNAi-antisense strand
ggaucuguggagucaacuauu

SEQ ID NO: 14341 - DNA, 21 bp, Homo sapiens
cagtggccatggaggatgcct

SEQ ID NO: 14342 - RNA, 21 nt, RNAi-sense strand
guggccauggaggaugccuuu

SEQ ID NO: 14343 - RNA, 21 nt, RNAi-antisense strand
aggcauccuccauggccacuu

SEQ ID NO: 14344 - DNA, 21 bp, Homo sapiens
cagcgatgcacacaccacgga

SEQ ID NO: 14345 - RNA, 21 nt, RNAi-sense strand
gcgaugcacacaccacggauu

SEQ ID NO: 14346 - RNA, 21 nt, RNAi-antisense strand
uccguggugugugcaucgcuu

SEQ ID NO: 14347 - DNA, 21 bp, Homo sapiens
caccgatgcctacggagagct

SEQ ID NO: 14348 - RNA, 21 nt, RNAi-sense strand
ccgaugccuacggagagcuuu

SEQ ID NO: 14349 - RNA, 21 nt, RNAi-antisense strand
agcucuccguaggcaucgguu

SEQ ID NO: 14350 - DNA, 21 bp, Homo sapiens
caagcacagcaatttcctccg

SEQ ID NO: 14351 - RNA, 21 nt, RNAi-sense strand
agcacagcaauuuccuccguu

SEQ ID NO: 14352 - RNA, 21 nt, RNAi-antisense strand
cggaggaaauugcugugcuuu

SEQ ID NO: 14353 - DNA, 21 bp, Homo sapiens
cacagcaatttcctccggctc

SEQ ID NO: 14354 - RNA, 21 nt, RNAi-sense strand
cagcaauuuccuccggcucuu

SEQ ID NO: 14355 - RNA, 21 nt, RNAi-antisense strand
gagccggaggaaauugcuguu

SEQ ID NO: 14356 - DNA, 21 bp, Homo sapiens
cagcaatttcctccggctctc

SEQ ID NO: 14357 - RNA, 21 nt, RNAi-sense strand
gcaauuuccuccggcucucuu

SEQ ID NO: 14358 - RNA, 21 nt, RNAi-antisense strand
gagagccggaggaaauugcuu

SEQ ID NO: 14359 - DNA, 21 bp, Homo sapiens
caatttcctccggctctctga

SEQ ID NO: 14360 - RNA, 21 nt, RNAi-sense strand
auuuccuccggcucucugauu

SEQ ID NO: 14361 - RNA, 21 nt, RNAi-antisense strand
ucagagagccggaggaaauuu

SEQ ID NO: 14362 - DNA, 21 bp, Homo sapiens
cagctgcagtttatagtctgg

SEQ ID NO: 14363 - RNA, 21 nt, RNAi-sense strand
gcugcaguuuauagucugguu

SEQ ID NO: 14364 - RNA, 21 nt, RNAi-antisense strand
ccagacuauaaacugcagcuu

SEQ ID NO: 14365 - DNA, 21 bp, Homo sapiens
cagtttatagtctggtcacac

SEQ ID NO: 14366 - RNA, 21 nt, RNAi-sense strand
guuuauagucuggucacacuu

SEQ ID NO: 14367 - RNA, 21 nt, RNAi-antisense strand
gugugaccagacuauaaacuu

SEQ ID NO: 14368 - DNA, 21 bp, Homo sapiens
cagagcacaggagcctggatt

SEQ ID NO: 14369 - RNA, 21 nt, RNAi-sense strand
gagcacaggagccuggauuuu

SEQ ID NO: 14370 - RNA, 21 nt, RNAi-antisense strand
aauccaggcuccugugcucuu

SEQ ID NO: 14371 - DNA, 21 bp, Homo sapiens
cacaggagcctggattgtcac

SEQ ID NO: 14372 - RNA, 21 nt, RNAi-sense strand
caggagccuggauugucacuu

SEQ ID NO: 14373 - RNA, 21 nt, RNAi-antisense strand
gugacaauccaggcuccuguu

SEQ ID NO: 14374 - DNA, 21 bp, Homo sapiens
caggagcctggattgtcactg

SEQ ID NO: 14375 - RNA, 21 nt, RNAi-sense strand
ggagccuggauugucacuguu

SEQ ID NO: 14376 - RNA, 21 nt, RNAi-antisense strand
cagugacaauccaggcuccuu

SEQ ID NO: 14377 - DNA, 21 bp, Homo sapiens
catgttggtgtggctgtacgg

SEQ ID NO: 14378 - RNA, 21 nt, RNAi-sense strand
uguugguguggcuguacgguu

SEQ ID NO: 14379 - RNA, 21 nt, RNAi-antisense strand
ccguacagccacaccaacauu

SEQ ID NO: 14380 - DNA, 21 bp, Homo sapiens
caactactcggccttcttcct

SEQ ID NO: 14381 - RNA, 21 nt, RNAi-sense strand
acuacucggccuucuuccuuu

SEQ ID NO: 14382 - RNA, 21 nt, RNAi-antisense strand
aggaagaaggccgaguaguuu

SEQ ID NO: 14383 - DNA, 21 bp, Homo sapiens
catgtctcctcgtggctggct

SEQ ID NO: 14384 - RNA, 21 nt, RNAi-sense strand
ugucuccucguggcuggcuuu

SEQ ID NO: 14385 - RNA, 21 nt, RNAi-antisense strand
agccagccacgaggagacauu

SEQ ID NO: 14386 - DNA, 21 bp, Homo sapiens
caggtggagaggattatgacc

SEQ ID NO: 14387 - RNA, 21 nt, RNAi-sense strand
gguggagaggauuaugaccuu

SEQ ID NO: 14388 - RNA, 21 nt, RNAi-antisense strand
ggucauaauccucuccaccuu

SEQ ID NO: 14389 - DNA, 21 bp, Homo sapiens
cagtctattcttctgaggatg

SEQ ID NO: 14390 - RNA, 21 nt, RNAi-sense strand
gucuauucuucugaggauguu

SEQ ID NO: 14391 - RNA, 21 nt, RNAi-antisense strand
cauccucagaagaauagacuu

SEQ ID NO: 14392 - DNA, 21 bp, Homo sapiens
cagcctacctggatgagctgc

SEQ ID NO: 14393 - RNA, 21 nt, RNAi-sense strand
gccuaccuggaugagcugcuu

SEQ ID NO: 14394 - RNA, 21 nt, RNAi-antisense strand
gcagcucauccagguaggcuu

SEQ ID NO: 14395 - DNA, 21 bp, Homo sapiens
catccaatggcggtccttcca

SEQ ID NO: 14396 - RNA, 21 nt, RNAi-sense strand
uccaauggcgguccuuccauu

SEQ ID NO: 14397 - RNA, 21 nt, RNAi-antisense strand
uggaaggaccgccauuggauu

SEQ ID NO: 14398 - DNA, 21 bp, Homo sapiens
caatggcggtccttccatctc

SEQ ID NO: 14399 - RNA, 21 nt, RNAi-sense strand
auggcgguccuuccaucucuu

SEQ ID NO: 14400 - RNA, 21 nt, RNAi-antisense strand
gagauggaaggaccgccauuu

SEQ ID NO: 14401 - DNA, 21 bp, Homo sapiens
caactcgctcatccgcaacct

SEQ ID NO: 14402 - RNA, 21 nt, RNAi-sense strand
acucgcucauccgcaaccuuu

SEQ ID NO: 14403 - RNA, 21 nt, RNAi-antisense strand
agguugcggaugagcgaguuu

SEQ ID NO: 14404 - DNA, 21 bp, Homo sapiens
catgtgctgaggatgctgctg

SEQ ID NO: 14405 - RNA, 21 nt, RNAi-sense strand
ugugcugaggaugcugcuguu

SEQ ID NO: 14406 - RNA, 21 nt, RNAi-antisense strand
cagcagcauccucagcacauu

SEQ ID NO: 14407 - DNA, 21 bp, Homo sapiens
catgtatctgctctcggacaa

SEQ ID NO: 14408 - RNA, 21 nt, RNAi-sense strand
uguaucugcucucggacaauu

SEQ ID NO: 14409 - RNA, 21 nt, RNAi-antisense strand
uuguccgagagcagauacauu

SEQ ID NO: 14410 - DNA, 21 bp, Homo sapiens
cacagatggccatgtacttct

SEQ ID NO: 14411 - RNA, 21 nt, RNAi-sense strand
cagauggccauguacuucuuu

SEQ ID NO: 14412 - RNA, 21 nt, RNAi-antisense strand
agaaguacauggccaucuguu

SEQ ID NO: 14413 - DNA, 21 bp, Homo sapiens
cagatggccatgtacttctgg

SEQ ID NO: 14414 - RNA, 21 nt, RNAi-sense strand
gauggccauguacuucugguu

SEQ ID NO: 14415 - RNA, 21 nt, RNAi-antisense strand
ccagaaguacauggccaucuu

SEQ ID NO: 14416 - DNA, 21 bp, Homo sapiens
caatgcagtttcctcagctct

SEQ ID NO: 14417 - RNA, 21 nt, RNAi-sense strand
augcaguuuccucagcucuuu

SEQ ID NO: 14418 - RNA, 21 nt, RNAi-antisense strand
agagcugaggaaacugcauuu

SEQ ID NO: 14419 - DNA, 21 bp, Homo sapiens
cagcacggaggaaagacctgg

SEQ ID NO: 14420 - RNA, 21 nt, RNAi-sense strand
gcacggaggaaagaccugguu

SEQ ID NO: 14421 - RNA, 21 nt, RNAi-antisense strand
ccaggucuuuccuccgugcuu

SEQ ID NO: 14422 - DNA, 21 bp, Homo sapiens
cacggaggaaagacctggcgt

SEQ ID NO: 14423 - RNA, 21 nt, RNAi-sense strand
cggaggaaagaccuggcguuu

SEQ ID NO: 14424 - RNA, 21 nt, RNAi-antisense strand
acgccaggucuuuccuccguu

SEQ ID NO: 14425 - DNA, 21 bp, Homo sapiens
cacttgcctccagctggccat

SEQ ID NO: 14426 - RNA, 21 nt, RNAi-sense strand
cuugccuccagcuggccauuu

SEQ ID NO: 14427 - RNA, 21 nt, RNAi-antisense strand
auggccagcuggaggcaaguu

SEQ ID NO: 14428 - DNA, 21 bp, Homo sapiens
cagctggccatgcaagctgac

SEQ ID NO: 14429 - RNA, 21 nt, RNAi-sense strand
gcuggccaugcaagcugacuu

SEQ ID NO: 14430 - RNA, 21 nt, RNAi-antisense strand
gucagcuugcauggccagcuu

SEQ ID NO: 14431 - DNA, 21 bp, Homo sapiens
cagtctctgctgacacagaag

SEQ ID NO: 14432 - RNA, 21 nt, RNAi-sense strand
gucucugcugacacagaaguu

SEQ ID NO: 14433 - RNA, 21 nt, RNAi-antisense strand
cuucugugucagcagagacuu

SEQ ID NO: 14434 - DNA, 21 bp, Homo sapiens
catcaccttcaggaaatcaga

SEQ ID NO: 14435 - RNA, 21 nt, RNAi-sense strand
ucaccuucaggaaaucagauu

SEQ ID NO: 14436 - RNA, 21 nt, RNAi-antisense strand
ucugauuuccugaaggugauu

SEQ ID NO: 14437 - DNA, 21 bp, Homo sapiens
caccttcaggaaatcagaaga

SEQ ID NO: 14438 - RNA, 21 nt, RNAi-sense strand
ccuucaggaaaucagaagauu

SEQ ID NO: 14439 - RNA, 21 nt, RNAi-antisense strand
ucuucugauuuccugaagguu

SEQ ID NO: 14440 - DNA, 21 bp, Homo sapiens
caggaaatcagaagaggagcc

SEQ ID NO: 14441 - RNA, 21 nt, RNAi-sense strand
ggaaaucagaagaggagccuu

SEQ ID NO: 14442 - RNA, 21 nt, RNAi-antisense strand
ggcuccucuucugauuuccuu

SEQ ID NO: 14443 - DNA, 21 bp, Homo sapiens
catggatagtgtcattaatgg

SEQ ID NO: 14444 - RNA, 21 nt, RNAi-sense strand
uggauagugucauuaaugguu

SEQ ID NO: 14445 - RNA, 21 nt, RNAi-antisense strand
ccauuaaugacacuauccauu

SEQ ID NO: 14446 - DNA, 21 bp, Homo sapiens
caacgtggtcagctacctgct

SEQ ID NO: 14447 - RNA, 21 nt, RNAi-sense strand
acguggucagcuaccugcuuu

SEQ ID NO: 14448 - RNA, 21 nt, RNAi-antisense strand
agcagguagcugaccacguuu

SEQ ID NO: 14449 - DNA, 21 bp, Homo sapiens
cagctacctgctgttcctgct

SEQ ID NO: 14450 - RNA, 21 nt, RNAi-sense strand
gcuaccugcuguuccugcuuu

SEQ ID NO: 14451 - RNA, 21 nt, RNAi-antisense strand
agcaggaacagcagguagcuu

SEQ ID NO: 14452 - DNA, 21 bp, Homo sapiens
cacgctgctgtgcgaggaact

SEQ ID NO: 14453 - RNA, 21 nt, RNAi-sense strand
cgcugcugugcgaggaacuuu

SEQ ID NO: 14454 - RNA, 21 nt, RNAi-antisense strand
aguuccucgcacagcagcguu

SEQ ID NO: 14455 - DNA, 21 bp, Homo sapiens
cagctggaaccagtgcgacct

SEQ ID NO: 14456 - RNA, 21 nt, RNAi-sense strand
gcuggaaccagugcgaccuuu

SEQ ID NO: 14457 - RNA, 21 nt, RNAi-antisense strand
aggucgcacugguuccagcuu

SEQ ID NO: 14458 - DNA, 21 bp, Homo sapiens
cagtgcgacctagtggctctc

SEQ ID NO: 14459 - RNA, 21 nt, RNAi-sense strand
gugcgaccuaguggcucucuu

SEQ ID NO: 14460 - RNA, 21 nt, RNAi-antisense strand
gagagccacuaggucgcacuu

SEQ ID NO: 14461 - DNA, 21 bp, Homo sapiens
cactgtcctctgcatcgactt

SEQ ID NO: 14462 - RNA, 21 nt, RNAi-sense strand
cuguccucugcaucgacuuuu

SEQ ID NO: 14463 - RNA, 21 nt, RNAi-antisense strand
aagucgaugcagaggacaguu

SEQ ID NO: 14464 - DNA, 21 bp, Homo sapiens
cacggtgcggctgcttcacat

SEQ ID NO: 14465 - RNA, 21 nt, RNAi-sense strand
cggugcggcugcuucacauuu

SEQ ID NO: 14466 - RNA, 21 nt, RNAi-antisense strand
augugaagcagccgcaccguu

SEQ ID NO: 14467 - DNA, 21 bp, Homo sapiens
cacatcttcacggtcaacaaa

SEQ ID NO: 14468 - RNA, 21 nt, RNAi-sense strand
caucuucacggucaacaaauu

SEQ ID NO: 14469 - RNA, 21 nt, RNAi-antisense strand
uuuguugaccgugaagauguu

SEQ ID NO: 14470 - DNA, 21 bp, Homo sapiens
catcttcacggtcaacaaaca

SEQ ID NO: 14471 - RNA, 21 nt, RNAi-sense strand
ucuucacggucaacaaacauu

SEQ ID NO: 14472 - RNA, 21 nt, RNAi-antisense strand
uguuuguugaccgugaagauu

SEQ ID NO: 14473 - DNA, 21 bp, Homo sapiens
caagatcgtcatcgtgagcaa

SEQ ID NO: 14474 - RNA, 21 nt, RNAi-sense strand
agaucgucaucgugagcaauu

SEQ ID NO: 14475 - RNA, 21 nt, RNAi-antisense strand
uugcucacgaugacgaucuuu

SEQ ID NO: 14476 - DNA, 21 bp, Homo sapiens
catcgtgagcaagatgatgaa

SEQ ID NO: 14477 - RNA, 21 nt, RNAi-sense strand
ucgugagcaagaugaugaauu

SEQ ID NO: 14478 - RNA, 21 nt, RNAi-antisense strand
uucaucaucuugcucacgauu

SEQ ID NO: 14479 - DNA, 21 bp, Homo sapiens
caagatgatgaaggacgtgtt

SEQ ID NO: 14480 - RNA, 21 nt, RNAi-sense strand
agaugaugaaggacguguuuu

SEQ ID NO: 14481 - RNA, 21 nt, RNAi-antisense strand
aacacguccuucaucaucuuu

SEQ ID NO: 14482 - DNA, 21 bp, Homo sapiens
catggagcacagcaactgctc

SEQ ID NO: 14483 - RNA, 21 nt, RNAi-sense strand
uggagcacagcaacugcucuu

SEQ ID NO: 14484 - RNA, 21 nt, RNAi-antisense strand
gagcaguugcugugcuccauu

SEQ ID NO: 14485 - DNA, 21 bp, Homo sapiens
cacagcaactgctcgtcggag

SEQ ID NO: 14486 - RNA, 21 nt, RNAi-sense strand
cagcaacugcucgucggaguu

SEQ ID NO: 14487 - RNA, 21 nt, RNAi-antisense strand
cuccgacgagcaguugcuguu

SEQ ID NO: 14488 - DNA, 21 bp, Homo sapiens
cagtatgccaactggctggtg

SEQ ID NO: 14489 - RNA, 21 nt, RNAi-sense strand
guaugccaacuggcugguguu

SEQ ID NO: 14490 - RNA, 21 nt, RNAi-antisense strand
caccagccaguuggcauacuu

SEQ ID NO: 14491 - DNA, 21 bp, Homo sapiens
caactggctggtggtgctgct

SEQ ID NO: 14492 - RNA, 21 nt, RNAi-sense strand
acuggcugguggugcugcuuu

SEQ ID NO: 14493 - RNA, 21 nt, RNAi-antisense strand
agcagcaccaccagccaguuu

SEQ ID NO: 14494 - DNA, 21 bp, Homo sapiens
catcttcctgctcgtggccaa

SEQ ID NO: 14495 - RNA, 21 nt, RNAi-sense strand
ucuuccugcucguggccaauu

SEQ ID NO: 14496 - RNA, 21 nt, RNAi-antisense strand
uuggccacgagcaggaagauu

SEQ ID NO: 14497 - DNA, 21 bp, Homo sapiens
caacatcctgctggtcaactt

SEQ ID NO: 14498 - RNA, 21 nt, RNAi-sense strand
acauccugcuggucaacuuuu

SEQ ID NO: 14499 - RNA, 21 nt, RNAi-antisense strand
aaguugaccagcaggauguuu

SEQ ID NO: 14500 - DNA, 21 bp, Homo sapiens
catcctgctggtcaacttgct

SEQ ID NO: 14501 - RNA, 21 nt, RNAi-sense strand
uccugcuggucaacuugcuuu

SEQ ID NO: 14502 - RNA, 21 nt, RNAi-antisense strand
agcaaguugaccagcaggauu

SEQ ID NO: 14503 - DNA, 21 bp, Homo sapiens
caacttgctcattgccatgtt

SEQ ID NO: 14504 - RNA, 21 nt, RNAi-sense strand
acuugcucauugccauguuuu

SEQ ID NO: 14505 - RNA, 21 nt, RNAi-antisense strand
aacauggcaaugagcaaguuu

SEQ ID NO: 14506 - DNA, 21 bp, Homo sapiens
cattgccatgttcagttacac

SEQ ID NO: 14507 - RNA, 21 nt, RNAi-sense strand
uugccauguucaguuacacuu

SEQ ID NO: 14508 - RNA, 21 nt, RNAi-antisense strand
guguaacugaacauggcaauu

SEQ ID NO: 14509 - DNA, 21 bp, Homo sapiens
catgttcagttacacattcgg

SEQ ID NO: 14510 - RNA, 21 nt, RNAi-sense strand
uguucaguuacacauucgguu

SEQ ID NO: 14511 - RNA, 21 nt, RNAi-antisense strand
ccgaauguguaacugaacauu

SEQ ID NO: 14512 - DNA, 21 bp, Homo sapiens
cagttacacattcggcaaagt

SEQ ID NO: 14513 - RNA, 21 nt, RNAi-sense strand
guuacacauucggcaaaguuu

SEQ ID NO: 14514 - RNA, 21 nt, RNAi-antisense strand
acuuugccgaauguguaacuu

SEQ ID NO: 14515 - DNA, 21 bp, Homo sapiens
caacagcgatctctactggaa

SEQ ID NO: 14516 - RNA, 21 nt, RNAi-sense strand
acagcgaucucuacuggaauu

SEQ ID NO: 14517 - RNA, 21 nt, RNAi-antisense strand
uuccaguagagaucgcuguuu

SEQ ID NO: 14518 - DNA, 21 bp, Homo sapiens
cagcgatctctactggaaggc

SEQ ID NO: 14519 - RNA, 21 nt, RNAi-sense strand
gcgaucucuacuggaaggcuu

SEQ ID NO: 14520 - RNA, 21 nt, RNAi-antisense strand
gccuuccaguagagaucgcuu

SEQ ID NO: 14521 - DNA, 21 bp, Homo sapiens
caggcaattgtgcaggcgacc

SEQ ID NO: 14522 - RNA, 21 nt, RNAi-sense strand
ggcaauugugcaggcgaccuu

SEQ ID NO: 14523 - RNA, 21 nt, RNAi-antisense strand
ggucgccugcacaauugccuu

SEQ ID NO: 14524 - DNA, 21 bp, Homo sapiens
cataaggagaactttctgctg

SEQ ID NO: 14525 - RNA, 21 nt, RNAi-sense strand
uaaggagaacuuucugcuguu

SEQ ID NO: 14526 - RNA, 21 nt, RNAi-antisense strand
cagcagaaaguucuccuuauu

SEQ ID NO: 14527 - DNA, 21 bp, Homo sapiens
cagaaggtggacttggcactg

SEQ ID NO: 14528 - RNA, 21 nt, RNAi-sense strand
gaagguggacuuggcacuguu

SEQ ID NO: 14529 - RNA, 21 nt, RNAi-antisense strand
cagugccaaguccaccuucuu

SEQ ID NO: 14530 - DNA, 21 bp, Homo sapiens
cacatccgcgagtacgaacag

SEQ ID NO: 14531 - RNA, 21 nt, RNAi-sense strand
cauccgcgaguacgaacaguu

SEQ ID NO: 14532 - RNA, 21 nt, RNAi-antisense strand
cuguucguacucgcggauguu

SEQ ID NO: 14533 - DNA, 21 bp, Homo sapiens
catccgcgagtacgaacagcg

SEQ ID NO: 14534 - RNA, 21 nt, RNAi-sense strand
uccgcgaguacgaacagcguu

SEQ ID NO: 14535 - RNA, 21 nt, RNAi-antisense strand
cgcuguucguacucgcggauu

SEQ ID NO: 14536 - DNA, 21 bp, Homo sapiens
cagcgcctgaaagtgctggag

SEQ ID NO: 14537 - RNA, 21 nt, RNAi-sense strand
gcgccugaaagugcuggaguu

SEQ ID NO: 14538 - RNA, 21 nt, RNAi-antisense strand
cuccagcacuuucaggcgcuu

SEQ ID NO: 14539 - DNA, 21 bp, Homo sapiens
cacctggtggccttgtccttg

SEQ ID NO: 14540 - RNA, 21 nt, RNAi-sense strand
ccugguggccuuguccuuguu

SEQ ID NO: 14541 - RNA, 21 nt, RNAi-antisense strand
caaggacaaggccaccagguu

SEQ ID NO: 14542 - DNA, 21 bp, Homo sapiens
cactgtcaggaccacctttgg

SEQ ID NO: 14543 - RNA, 21 nt, RNAi-sense strand
cugucaggaccaccuuugguu

SEQ ID NO: 14544 - RNA, 21 nt, RNAi-antisense strand
ccaaaggugguccugacaguu

SEQ ID NO: 14545 - DNA, 21 bp, Homo sapiens
catccttacaaaccacagcat

SEQ ID NO: 14546 - RNA, 21 nt, RNAi-sense strand
uccuuacaaaccacagcauuu

SEQ ID NO: 14547 - RNA, 21 nt, RNAi-antisense strand
augcugugguuuguaaggauu

SEQ ID NO: 14548 - DNA, 21 bp, Homo sapiens
caccactcacagattcctcac

SEQ ID NO: 14549 - RNA, 21 nt, RNAi-sense strand
ccacucacagauuccucacuu

SEQ ID NO: 14550 - RNA, 21 nt, RNAi-antisense strand
gugaggaaucugugagugguu

SEQ ID NO: 14551 - DNA, 21 bp, Homo sapiens
cactcacagattcctcacact

SEQ ID NO: 14552 - RNA, 21 nt, RNAi-sense strand
cucacagauuccucacacuuu

SEQ ID NO: 14553 - RNA, 21 nt, RNAi-antisense strand
agugugaggaaucugugaguu

SEQ ID NO: 14554 - DNA, 21 bp, Homo sapiens
gagaaggagcagagctggatc

SEQ ID NO: 14555 - RNA, 21 nt, RNAi-sense strand
gaaggagcagagcuggaucuu

SEQ ID NO: 14556 - RNA, 21 nt, RNAi-antisense strand
gauccagcucugcuccuucuu

SEQ ID NO: 14557 - DNA, 21 bp, Homo sapiens
gatcttcaagaagaagacctg

SEQ ID NO: 14558 - RNA, 21 nt, RNAi-sense strand
ucuucaagaagaagaccuguu

SEQ ID NO: 14559 - RNA, 21 nt, RNAi-antisense strand
caggucuucuucuugaagauu

SEQ ID NO: 14560 - DNA, 21 bp, Homo sapiens
gaagaagacctgcacgacgtt

SEQ ID NO: 14561 - RNA, 21 nt, RNAi-sense strand
agaagaccugcacgacguuuu

SEQ ID NO: 14562 - RNA, 21 nt, RNAi-antisense strand
aacgucgugcaggucuucuuu

SEQ ID NO: 14563 - DNA, 21 bp, Homo sapiens
gaagacctgcacgacgttcat

SEQ ID NO: 14564 - RNA, 21 nt, RNAi-sense strand
agaccugcacgacguucauuu

SEQ ID NO: 14565 - RNA, 21 nt, RNAi-antisense strand
augaacgucgugcaggucuuu

SEQ ID NO: 14566 - DNA, 21 bp, Homo sapiens
gacctgcacgacgttcatagt

SEQ ID NO: 14567 - RNA, 21 nt, RNAi-sense strand
ccugcacgacguucauaguuu

SEQ ID NO: 14568 - RNA, 21 nt, RNAi-antisense strand
acuaugaacgucgugcagguu

SEQ ID NO: 14569 - DNA, 21 bp, Homo sapiens
gacgttcatagttgactccac

SEQ ID NO: 14570 - RNA, 21 nt, RNAi-sense strand
cguucauaguugacuccacuu

SEQ ID NO: 14571 - RNA, 21 nt, RNAi-antisense strand
guggagucaacuaugaacguu

SEQ ID NO: 14572 - DNA, 21 bp, Homo sapiens
gacagcgatgcacacaccacg

SEQ ID NO: 14573 - RNA, 21 nt, RNAi-sense strand
cagcgaugcacacaccacguu

SEQ ID NO: 14574 - RNA, 21 nt, RNAi-antisense strand
cguggugugugcaucgcuguu

SEQ ID NO: 14575 - DNA, 21 bp, Homo sapiens
gatgcacacaccacggagaag

SEQ ID NO: 14576 - RNA, 21 nt, RNAi-sense strand
ugcacacaccacggagaaguu

SEQ ID NO: 14577 - RNA, 21 nt, RNAi-antisense strand
cuucuccguggugugugcauu

SEQ ID NO: 14578 - DNA, 21 bp, Homo sapiens
gatgcctacggagagctggac

SEQ ID NO: 14579 - RNA, 21 nt, RNAi-sense strand
ugccuacggagagcuggacuu

SEQ ID NO: 14580 - RNA, 21 nt, RNAi-antisense strand
guccagcucuccguaggcauu

SEQ ID NO: 14581 - DNA, 21 bp, Homo sapiens
gaccgaacggatccagctgca

SEQ ID NO: 14582 - RNA, 21 nt, RNAi-sense strand
ccgaacggauccagcugcauu

SEQ ID NO: 14583 - RNA, 21 nt, RNAi-antisense strand
ugcagcuggauccguucgguu

SEQ ID NO: 14584 - DNA, 21 bp, Homo sapiens
gaacggatccagctgcagttt

SEQ ID NO: 14585 - RNA, 21 nt, RNAi-sense strand
acggauccagcugcaguuuuu

SEQ ID NO: 14586 - RNA, 21 nt, RNAi-antisense strand
aaacugcagcuggauccguuu

SEQ ID NO: 14587 - DNA, 21 bp, Homo sapiens
gatccagctgcagtttatagt

SEQ ID NO: 14588 - RNA, 21 nt, RNAi-sense strand
uccagcugcaguuuauaguuu

SEQ ID NO: 14589 - RNA, 21 nt, RNAi-antisense strand
acuauaaacugcagcuggauu

SEQ ID NO: 14590 - DNA, 21 bp, Homo sapiens
gaacctggtggtgtcagtgct

SEQ ID NO: 14591 - RNA, 21 nt, RNAi-sense strand
accugguggugucagugcuuu

SEQ ID NO: 14592 - RNA, 21 nt, RNAi-antisense strand
agcacugacaccaccagguuu

SEQ ID NO: 14593 - DNA, 21 bp, Homo sapiens
gagcacaggagcctggattgt

SEQ ID NO: 14594 - RNA, 21 nt, RNAi-sense strand
gcacaggagccuggauuguuu

SEQ ID NO: 14595 - RNA, 21 nt, RNAi-antisense strand
acaauccaggcuccugugcuu

SEQ ID NO: 14596 - DNA, 21 bp, Homo sapiens
gaccatcagatggccagcact

SEQ ID NO: 14597 - RNA, 21 nt, RNAi-sense strand
ccaucagauggccagcacuuu

SEQ ID NO: 14598 - RNA, 21 nt, RNAi-antisense strand
agugcuggccaucugaugguu

SEQ ID NO: 14599 - DNA, 21 bp, Homo sapiens
gactacaactactcggccttc

SEQ ID NO: 14600 - RNA, 21 nt, RNAi-sense strand
cuacaacuacucggccuucuu

SEQ ID NO: 14601 - RNA, 21 nt, RNAi-antisense strand
gaaggccgaguaguuguaguu

SEQ ID NO: 14602 - DNA, 21 bp, Homo sapiens
gagtcctacatctcacagcag

SEQ ID NO: 14603 - RNA, 21 nt, RNAi-sense strand
guccuacaucucacagcaguu

SEQ ID NO: 14604 - RNA, 21 nt, RNAi-antisense strand
cugcugugagauguaggacuu

SEQ ID NO: 14605 - DNA, 21 bp, Homo sapiens
gattgatggtgatgagaagat

SEQ ID NO: 14606 - RNA, 21 nt, RNAi-sense strand
uugauggugaugagaagauuu

SEQ ID NO: 14607 - RNA, 21 nt, RNAi-antisense strand
aucuucucaucaccaucaauu

SEQ ID NO: 14608 - DNA, 21 bp, Homo sapiens
gatggtgatgagaagatgttg

SEQ ID NO: 14609 - RNA, 21 nt, RNAi-sense strand
uggugaugagaagauguuguu

SEQ ID NO: 14610 - RNA, 21 nt, RNAi-antisense strand
caacaucuucucaucaccauu

SEQ ID NO: 14611 - DNA, 21 bp, Homo sapiens
gatgagaagatgttgacgcga

SEQ ID NO: 14612 - RNA, 21 nt, RNAi-sense strand
ugagaagauguugacgcgauu

SEQ ID NO: 14613 - RNA, 21 nt, RNAi-antisense strand
ucgcgucaacaucuucucauu

SEQ ID NO: 14614 - DNA, 21 bp, Homo sapiens
gagaagatgttgacgcgaata

SEQ ID NO: 14615 - RNA, 21 nt, RNAi-sense strand
gaagauguugacgcgaauauu

SEQ ID NO: 14616 - RNA, 21 nt, RNAi-antisense strand
uauucgcgucaacaucuucuu

SEQ ID NO: 14617 - DNA, 21 bp, Homo sapiens
gaagatgttgacgcgaataga

SEQ ID NO: 14618 - RNA, 21 nt, RNAi-sense strand
agauguugacgcgaauagauu

SEQ ID NO: 14619 - RNA, 21 nt, RNAi-antisense strand
ucuauucgcgucaacaucuuu

SEQ ID NO: 14620 - DNA, 21 bp, Homo sapiens
gatgttgacgcgaatagagaa

SEQ ID NO: 14621 - RNA, 21 nt, RNAi-sense strand
uguugacgcgaauagagaauu

SEQ ID NO: 14622 - RNA, 21 nt, RNAi-antisense strand
uucucuauucgcgucaacauu

SEQ ID NO: 14623 - DNA, 21 bp, Homo sapiens
gacgcgaatagagaacgccac

SEQ ID NO: 14624 - RNA, 21 nt, RNAi-sense strand
cgcgaauagagaacgccacuu

SEQ ID NO: 14625 - RNA, 21 nt, RNAi-antisense strand
guggcguucucuauucgcguu

SEQ ID NO: 14626 - DNA, 21 bp, Homo sapiens
gagatcgaatcaggcgtttct

SEQ ID NO: 14627 - RNA, 21 nt, RNAi-sense strand
gaucgaaucaggcguuucuuu

SEQ ID NO: 14628 - RNA, 21 nt, RNAi-antisense strand
agaaacgccugauucgaucuu

SEQ ID NO: 14629 - DNA, 21 bp, Homo sapiens
gatcgaatcaggcgtttcttt

SEQ ID NO: 14630 - RNA, 21 nt, RNAi-sense strand
ucgaaucaggcguuucuuuuu

SEQ ID NO: 14631 - RNA, 21 nt, RNAi-antisense strand
aaagaaacgccugauucgauu

SEQ ID NO: 14632 - DNA, 21 bp, Homo sapiens
gaaggagctcctgacagtcta

SEQ ID NO: 14633 - RNA, 21 nt, RNAi-sense strand
aggagcuccugacagucuauu

SEQ ID NO: 14634 - RNA, 21 nt, RNAi-antisense strand
uagacugucaggagcuccuuu

SEQ ID NO: 14635 - DNA, 21 bp, Homo sapiens
gagctcctgacagtctattct

SEQ ID NO: 14636 - RNA, 21 nt, RNAi-sense strand
gcuccugacagucuauucuuu

SEQ ID NO: 14637 - RNA, 21 nt, RNAi-antisense strand
agaauagacugucaggagcuu

SEQ ID NO: 14638 - DNA, 21 bp, Homo sapiens
gacagtctattcttctgagga

SEQ ID NO: 14639 - RNA, 21 nt, RNAi-sense strand
cagucuauucuucugaggauu

SEQ ID NO: 14640 - RNA, 21 nt, RNAi-antisense strand
uccucagaagaauagacuguu

SEQ ID NO: 14641 - DNA, 21 bp, Homo sapiens
gaggaattcgagaccatagtt

SEQ ID NO: 14642 - RNA, 21 nt, RNAi-sense strand
ggaauucgagaccauaguuuu

SEQ ID NO: 14643 - RNA, 21 nt, RNAi-antisense strand
aacuauggucucgaauuccuu

SEQ ID NO: 14644 - DNA, 21 bp, Homo sapiens
gaggcctcagcctacctggat

SEQ ID NO: 14645 - RNA, 21 nt, RNAi-sense strand
ggccucagccuaccuggauuu

SEQ ID NO: 14646 - RNA, 21 nt, RNAi-antisense strand
auccagguaggcugaggccuu

SEQ ID NO: 14647 - DNA, 21 bp, Homo sapiens
gatgagctgcgtttggctgtg

SEQ ID NO: 14648 - RNA, 21 nt, RNAi-sense strand
ugagcugcguuuggcuguguu

SEQ ID NO: 14649 - RNA, 21 nt, RNAi-antisense strand
cacagccaaacgcagcucauu

SEQ ID NO: 14650 - DNA, 21 bp, Homo sapiens
gagctgcgtttggctgtggct

SEQ ID NO: 14651 - RNA, 21 nt, RNAi-sense strand
gcugcguuuggcuguggcuuu

SEQ ID NO: 14652 - RNA, 21 nt, RNAi-antisense strand
agccacagccaaacgcagcuu

SEQ ID NO: 14653 - DNA, 21 bp, Homo sapiens
gacatccaatggcggtccttc

SEQ ID NO: 14654 - RNA, 21 nt, RNAi-sense strand
cauccaauggcgguccuucuu

SEQ ID NO: 14655 - RNA, 21 nt, RNAi-antisense strand
gaaggaccgccauuggauguu

SEQ ID NO: 14656 - DNA, 21 bp, Homo sapiens
gaatgaccggcctgagttcgt

SEQ ID NO: 14657 - RNA, 21 nt, RNAi-sense strand
augaccggccugaguucguuu

SEQ ID NO: 14658 - RNA, 21 nt, RNAi-antisense strand
acgaacucaggccggucauuu

SEQ ID NO: 14659 - DNA, 21 bp, Homo sapiens
gagttcgtgcgcttgctcatt

SEQ ID NO: 14660 - RNA, 21 nt, RNAi-sense strand
guucgugcgcuugcucauuuu

SEQ ID NO: 14661 - RNA, 21 nt, RNAi-antisense strand
aaugagcaagcgcacgaacuu

SEQ ID NO: 14662 - DNA, 21 bp, Homo sapiens
gagagcatgtatctgctctcg

SEQ ID NO: 14663 - RNA, 21 nt, RNAi-sense strand
gagcauguaucugcucucguu

SEQ ID NO: 14664 - RNA, 21 nt, RNAi-antisense strand
cgagagcagauacaugcucuu

SEQ ID NO: 14665 - DNA, 21 bp, Homo sapiens
gagcatgtatctgctctcgga

SEQ ID NO: 14666 - RNA, 21 nt, RNAi-sense strand
gcauguaucugcucucggauu

SEQ ID NO: 14667 - RNA, 21 nt, RNAi-antisense strand
uccgagagcagauacaugcuu

SEQ ID NO: 14668 - DNA, 21 bp, Homo sapiens
gaggaggcagcacggaggaaa

SEQ ID NO: 14669 - RNA, 21 nt, RNAi-sense strand
ggaggcagcacggaggaaauu

SEQ ID NO: 14670 - RNA, 21 nt, RNAi-antisense strand
uuuccuccgugcugccuccuu

SEQ ID NO: 14671 - DNA, 21 bp, Homo sapiens
gaggcagcacggaggaaagac

SEQ ID NO: 14672 - RNA, 21 nt, RNAi-sense strand
ggcagcacggaggaaagacuu

SEQ ID NO: 14673 - RNA, 21 nt, RNAi-antisense strand
gucuuuccuccgugcugccuu

SEQ ID NO: 14674 - DNA, 21 bp, Homo sapiens
gaggaaagacctggcgttcaa

SEQ ID NO: 14675 - RNA, 21 nt, RNAi-sense strand
ggaaagaccuggcguucaauu

SEQ ID NO: 14676 - RNA, 21 nt, RNAi-antisense strand
uugaacgccaggucuuuccuu

SEQ ID NO: 14677 - DNA, 21 bp, Homo sapiens
gaaagacctggcgttcaagtt

SEQ ID NO: 14678 - RNA, 21 nt, RNAi-sense strand
aagaccuggcguucaaguuuu

SEQ ID NO: 14679 - RNA, 21 nt, RNAi-antisense strand
aacuugaacgccaggucuuuu

SEQ ID NO: 14680 - DNA, 21 bp, Homo sapiens
gacctggcgttcaagtttgag

SEQ ID NO: 14681 - RNA, 21 nt, RNAi-sense strand
ccuggcguucaaguuugaguu

SEQ ID NO: 14682 - RNA, 21 nt, RNAi-antisense strand
cucaaacuugaacgccagguu

SEQ ID NO: 14683 - DNA, 21 bp, Homo sapiens
gacctctttggcgagtgctat

SEQ ID NO: 14684 - RNA, 21 nt, RNAi-sense strand
ccucuuuggcgagugcuauuu

SEQ ID NO: 14685 - RNA, 21 nt, RNAi-antisense strand
auagcacucgccaaagagguu

SEQ ID NO: 14686 - DNA, 21 bp, Homo sapiens
gagtgctatcgcagcagtgag

SEQ ID NO: 14687 - RNA, 21 nt, RNAi-sense strand
gugcuaucgcagcagugaguu

SEQ ID NO: 14688 - RNA, 21 nt, RNAi-antisense strand
cucacugcugcgauagcacuu

SEQ ID NO: 14689 - DNA, 21 bp, Homo sapiens
gatgccacttgcctccagctg

SEQ ID NO: 14690 - RNA, 21 nt, RNAi-sense strand
ugccacuugccuccagcuguu

SEQ ID NO: 14691 - RNA, 21 nt, RNAi-antisense strand
cagcuggaggcaaguggcauu

SEQ ID NO: 14692 - DNA, 21 bp, Homo sapiens
gagatatggccagcactacac

SEQ ID NO: 14693 - RNA, 21 nt, RNAi-sense strand
gauauggccagcacuacacuu

SEQ ID NO: 14694 - RNA, 21 nt, RNAi-antisense strand
guguagugcuggccauaucuu

SEQ ID NO: 14695 - DNA, 21 bp, Homo sapiens
gaggagctagagtttgacatg

SEQ ID NO: 14696 - RNA, 21 nt, RNAi-sense strand
ggagcuagaguuugacauguu

SEQ ID NO: 14697 - RNA, 21 nt, RNAi-antisense strand
caugucaaacucuagcuccuu

SEQ ID NO: 14698 - DNA, 21 bp, Homo sapiens
gagctagagtttgacatggat

SEQ ID NO: 14699 - RNA, 21 nt, RNAi-sense strand
gcuagaguuugacauggauuu

SEQ ID NO: 14700 - RNA, 21 nt, RNAi-antisense strand
auccaugucaaacucuagcuu

SEQ ID NO: 14701 - DNA, 21 bp, Homo sapiens
gagtttgacatggatagtgtc

SEQ ID NO: 14702 - RNA, 21 nt, RNAi-sense strand
guuugacauggauagugucuu

SEQ ID NO: 14703 - RNA, 21 nt, RNAi-antisense strand
gacacuauccaugucaaacuu

SEQ ID NO: 14704 - DNA, 21 bp, Homo sapiens
gacatggatagtgtcattaat

SEQ ID NO: 14705 - RNA, 21 nt, RNAi-sense strand
cauggauagugucauuaauuu

SEQ ID NO: 14706 - RNA, 21 nt, RNAi-antisense strand
auuaaugacacuauccauguu

SEQ ID NO: 14707 - DNA, 21 bp, Homo sapiens
gagctgctgctctatttctgg

SEQ ID NO: 14708 - RNA, 21 nt, RNAi-sense strand
gcugcugcucuauuucugguu

SEQ ID NO: 14709 - RNA, 21 nt, RNAi-antisense strand
ccagaaauagagcagcagcuu

SEQ ID NO: 14710 - DNA, 21 bp, Homo sapiens
gacagctggaaccagtgcgac

SEQ ID NO: 14711 - RNA, 21 nt, RNAi-sense strand
cagcuggaaccagugcgacuu

SEQ ID NO: 14712 - RNA, 21 nt, RNAi-antisense strand
gucgcacugguuccagcuguu

SEQ ID NO: 14713 - DNA, 21 bp, Homo sapiens
gaaccagtgcgacctagtggc

SEQ ID NO: 14714 - RNA, 21 nt, RNAi-sense strand
accagugcgaccuaguggcuu

SEQ ID NO: 14715 - RNA, 21 nt, RNAi-antisense strand
gccacuaggucgcacugguuu

SEQ ID NO: 14716 - DNA, 21 bp, Homo sapiens
gacctagtggctctcacctgc

SEQ ID NO: 14717 - RNA, 21 nt, RNAi-sense strand
ccuaguggcucucaccugcuu

SEQ ID NO: 14718 - RNA, 21 nt, RNAi-antisense strand
gcaggugagagccacuagguu

SEQ ID NO: 14719 - DNA, 21 bp, Homo sapiens
gatcgtcatcgtgagcaagat

SEQ ID NO: 14720 - RNA, 21 nt, RNAi-sense strand
ucgucaucgugagcaagauuu

SEQ ID NO: 14721 - RNA, 21 nt, RNAi-antisense strand
aucuugcucacgaugacgauu

SEQ ID NO: 14722 - DNA, 21 bp, Homo sapiens
gagcaagatgatgaaggacgt

SEQ ID NO: 14723 - RNA, 21 nt, RNAi-sense strand
gcaagaugaugaaggacguuu

SEQ ID NO: 14724 - RNA, 21 nt, RNAi-antisense strand
acguccuucaucaucuugcuu

SEQ ID NO: 14725 - DNA, 21 bp, Homo sapiens
gatgatgaaggacgtgttctt

SEQ ID NO: 14726 - RNA, 21 nt, RNAi-sense strand
ugaugaaggacguguucuuuu

SEQ ID NO: 14727 - RNA, 21 nt, RNAi-antisense strand
aagaacacguccuucaucauu

SEQ ID NO: 14728 - DNA, 21 bp, Homo sapiens
gatgaaggacgtgttcttctt

SEQ ID NO: 14729 - RNA, 21 nt, RNAi-sense strand
ugaaggacguguucuucuuuu

SEQ ID NO: 14730 - RNA, 21 nt, RNAi-antisense strand
aagaagaacacguccuucauu

SEQ ID NO: 14731 - DNA, 21 bp, Homo sapiens
gaaggacgtgttcttcttcct

SEQ ID NO: 14732 - RNA, 21 nt, RNAi-sense strand
aggacguguucuucuuccuuu

SEQ ID NO: 14733 - RNA, 21 nt, RNAi-antisense strand
aggaagaagaacacguccuuu

SEQ ID NO: 14734 - DNA, 21 bp, Homo sapiens
gacgtgttcttcttcctcttc

SEQ ID NO: 14735 - RNA, 21 nt, RNAi-sense strand
cguguucuucuuccucuucuu

SEQ ID NO: 14736 - RNA, 21 nt, RNAi-antisense strand
gaagaggaagaagaacacguu

SEQ ID NO: 14737 - DNA, 21 bp, Homo sapiens
gagcacagcaactgctcgtcg

SEQ ID NO: 14738 - RNA, 21 nt, RNAi-sense strand
gcacagcaacugcucgucguu

SEQ ID NO: 14739 - RNA, 21 nt, RNAi-antisense strand
cgacgagcaguugcugugcuu

SEQ ID NO: 14740 - DNA, 21 bp, Homo sapiens
gatctctactggaaggcgcag

SEQ ID NO: 14741 - RNA, 21 nt, RNAi-sense strand
ucucuacuggaaggcgcaguu

SEQ ID NO: 14742 - RNA, 21 nt, RNAi-antisense strand
cugcgccuuccaguagagauu

SEQ ID NO: 14743 - DNA, 21 bp, Homo sapiens
gaagccgagcggaagctgcta

SEQ ID NO: 14744 - RNA, 21 nt, RNAi-sense strand
agccgagcggaagcugcuauu

SEQ ID NO: 14745 - RNA, 21 nt, RNAi-antisense strand
uagcagcuuccgcucggcuuu

SEQ ID NO: 14746 - DNA, 21 bp, Homo sapiens
gagcggaagctgctaacgtgg

SEQ ID NO: 14747 - RNA, 21 nt, RNAi-sense strand
gcggaagcugcuaacgugguu

SEQ ID NO: 14748 - RNA, 21 nt, RNAi-antisense strand
ccacguuagcagcuuccgcuu

SEQ ID NO: 14749 - DNA, 21 bp, Homo sapiens
gaatcggtgcataaggagaac

SEQ ID NO: 14750 - RNA, 21 nt, RNAi-sense strand
aucggugcauaaggagaacuu

SEQ ID NO: 14751 - RNA, 21 nt, RNAi-antisense strand
guucuccuuaugcaccgauuu

SEQ ID NO: 14752 - DNA, 21 bp, Homo sapiens
gagaactttctgctggcacgc

SEQ ID NO: 14753 - RNA, 21 nt, RNAi-sense strand
gaacuuucugcuggcacgcuu

SEQ ID NO: 14754 - RNA, 21 nt, RNAi-antisense strand
gcgugccagcagaaaguucuu

SEQ ID NO: 14755 - DNA, 21 bp, Homo sapiens
gaactttctgctggcacgcgc

SEQ ID NO: 14756 - RNA, 21 nt, RNAi-sense strand
acuuucugcuggcacgcgcuu

SEQ ID NO: 14757 - RNA, 21 nt, RNAi-antisense strand
gcgcgugccagcagaaaguuu

SEQ ID NO: 14758 - DNA, 21 bp, Homo sapiens
gagcgactccgagcgtctgaa

SEQ ID NO: 14759 - RNA, 21 nt, RNAi-sense strand
gcgacuccgagcgucugaauu

SEQ ID NO: 14760 - RNA, 21 nt, RNAi-antisense strand
uucagacgcucggagucgcuu

SEQ ID NO: 14761 - DNA, 21 bp, Homo sapiens
gaaggtggacttggcactgaa

SEQ ID NO: 14762 - RNA, 21 nt, RNAi-sense strand
agguggacuuggcacugaauu

SEQ ID NO: 14763 - RNA, 21 nt, RNAi-antisense strand
uucagugccaaguccaccuuu

SEQ ID NO: 14764 - DNA, 21 bp, Homo sapiens
gacttggcactgaaacagctg

SEQ ID NO: 14765 - RNA, 21 nt, RNAi-sense strand
cuuggcacugaaacagcuguu

SEQ ID NO: 14766 - RNA, 21 nt, RNAi-antisense strand
cagcuguuucagugccaaguu

SEQ ID NO: 14767 - DNA, 21 bp, Homo sapiens
gacacatccgcgagtacgaac

SEQ ID NO: 14768 - RNA, 21 nt, RNAi-sense strand
cacauccgcgaguacgaacuu

SEQ ID NO: 14769 - RNA, 21 nt, RNAi-antisense strand
guucguacucgcggauguguu

SEQ ID NO: 14770 - DNA, 21 bp, Homo sapiens
gagtacgaacagcgcctgaaa

SEQ ID NO: 14771 - RNA, 21 nt, RNAi-sense strand
guacgaacagcgccugaaauu

SEQ ID NO: 14772 - RNA, 21 nt, RNAi-antisense strand
uuucaggcgcuguucguacuu

SEQ ID NO: 14773 - DNA, 21 bp, Homo sapiens
gaacagcgcctgaaagtgctg

SEQ ID NO: 14774 - RNA, 21 nt, RNAi-sense strand
acagcgccugaaagugcuguu

SEQ ID NO: 14775 - RNA, 21 nt, RNAi-antisense strand
cagcacuuucaggcgcuguuu

SEQ ID NO: 14776 - DNA, 21 bp, Homo sapiens
gagtgtcatccttacaaacca

SEQ ID NO: 14777 - RNA, 21 nt, RNAi-sense strand
gugucauccuuacaaaccauu

SEQ ID NO: 14778 - RNA, 21 nt, RNAi-antisense strand
ugguuuguaaggaugacacuu

SEQ ID NO: 14779 - DNA, 21 bp, Homo sapiens
gaaataaagccatttcagagg

SEQ ID NO: 14780 - RNA, 21 nt, RNAi-sense strand
aauaaagccauuucagagguu

SEQ ID NO: 14781 - RNA, 21 nt, RNAi-antisense strand
ccucugaaauggcuuuauuuu

SEQ ID NO: 14782 - DNA, 21 bp, Homo sapiens
tagttgactccacagatccgg

SEQ ID NO: 14783 - RNA, 21 nt, RNAi-sense strand
guugacuccacagauccgguu

SEQ ID NO: 14784 - RNA, 21 nt, RNAi-antisense strand
ccggaucuguggagucaacuu

SEQ ID NO: 14785 - DNA, 21 bp, Homo sapiens
tacggagagctggacttcacg

SEQ ID NO: 14786 - RNA, 21 nt, RNAi-sense strand
cggagagcuggacuucacguu

SEQ ID NO: 14787 - RNA, 21 nt, RNAi-antisense strand
cgugaaguccagcucuccguu

SEQ ID NO: 14788 - DNA, 21 bp, Homo sapiens
tatagtctggtcacacgcaca

SEQ ID NO: 14789 - RNA, 21 nt, RNAi-sense strand
uagucuggucacacgcacauu

SEQ ID NO: 14790 - RNA, 21 nt, RNAi-antisense strand
ugugcgugugaccagacuauu

SEQ ID NO: 14791 - DNA, 21 bp, Homo sapiens
tagtctggtcacacgcacatg

SEQ ID NO: 14792 - RNA, 21 nt, RNAi-sense strand
gucuggucacacgcacauguu

SEQ ID NO: 14793 - RNA, 21 nt, RNAi-antisense strand
caugugcgugugaccagacuu

SEQ ID NO: 14794 - DNA, 21 bp, Homo sapiens
tacaactactcggccttcttc

SEQ ID NO: 14795 - RNA, 21 nt, RNAi-sense strand
caacuacucggccuucuucuu

SEQ ID NO: 14796 - RNA, 21 nt, RNAi-antisense strand
gaagaaggccgaguaguuguu

SEQ ID NO: 14797 - DNA, 21 bp, Homo sapiens
tactcggccttcttcctggtg

SEQ ID NO: 14798 - RNA, 21 nt, RNAi-sense strand
cucggccuucuuccugguguu

SEQ ID NO: 14799 - RNA, 21 nt, RNAi-antisense strand
caccaggaagaaggccgaguu

SEQ ID NO: 14800 - DNA, 21 bp, Homo sapiens
tacatctcacagcagaagacg

SEQ ID NO: 14801 - RNA, 21 nt, RNAi-sense strand
caucucacagcagaagacguu

SEQ ID NO: 14802 - RNA, 21 nt, RNAi-antisense strand
cgucuucugcugugagauguu

SEQ ID NO: 14803 - DNA, 21 bp, Homo sapiens
tacctggatgagctgcgtttg

SEQ ID NO: 14804 - RNA, 21 nt, RNAi-sense strand
ccuggaugagcugcguuuguu

SEQ ID NO: 14805 - RNA, 21 nt, RNAi-antisense strand
caaacgcagcucauccagguu

SEQ ID NO: 14806 - DNA, 21 bp, Homo sapiens
tatctgctctcggacaaggcc

SEQ ID NO: 14807 - RNA, 21 nt, RNAi-sense strand
ucugcucucggacaaggccuu

SEQ ID NO: 14808 - RNA, 21 nt, RNAi-antisense strand
ggccuuguccgagagcagauu

SEQ ID NO: 14809 - DNA, 21 bp, Homo sapiens
tatcgcagcagtgaggtgagg

SEQ ID NO: 14810 - RNA, 21 nt, RNAi-sense strand
ucgcagcagugaggugagguu

SEQ ID NO: 14811 - RNA, 21 nt, RNAi-antisense strand
ccucaccucacugcugcgauu

SEQ ID NO: 14812 - DNA, 21 bp, Homo sapiens
tacagtctctgctgacacaga

SEQ ID NO: 14813 - RNA, 21 nt, RNAi-sense strand
cagucucugcugacacagauu

SEQ ID NO: 14814 - RNA, 21 nt, RNAi-antisense strand
ucugugucagcagagacuguu

SEQ ID NO: 14815 - DNA, 21 bp, Homo sapiens
tagagtttgacatggatagtg

SEQ ID NO: 14816 - RNA, 21 nt, RNAi-sense strand
gaguuugacauggauaguguu

SEQ ID NO: 14817 - RNA, 21 nt, RNAi-antisense strand
cacuauccaugucaaacucuu

SEQ ID NO: 14818 - DNA, 21 bp, Homo sapiens
tacgccgctggttccacttct

SEQ ID NO: 14819 - RNA, 21 nt, RNAi-sense strand
cgccgcugguuccacuucuuu

SEQ ID NO: 14820 - RNA, 21 nt, RNAi-antisense strand
agaaguggaaccagcggcguu

SEQ ID NO: 14821 - DNA, 21 bp, Homo sapiens
tacctgctgttcctgctgctt

SEQ ID NO: 14822 - RNA, 21 nt, RNAi-sense strand
ccugcuguuccugcugcuuuu

SEQ ID NO: 14823 - RNA, 21 nt, RNAi-antisense strand
aagcagcaggaacagcagguu

SEQ ID NO: 14824 - DNA, 21 bp, Homo sapiens
tacctcgccgacagctggaac

SEQ ID NO: 14825 - RNA, 21 nt, RNAi-sense strand
ccucgccgacagcuggaacuu

SEQ ID NO: 14826 - RNA, 21 nt, RNAi-antisense strand
guuccagcugucggcgagguu

SEQ ID NO: 14827 - DNA, 21 bp, Homo sapiens
tagtggctctcacctgcttcc

SEQ ID NO: 14828 - RNA, 21 nt, RNAi-sense strand
guggcucucaccugcuuccuu

SEQ ID NO: 14829 - RNA, 21 nt, RNAi-antisense strand
ggaagcaggugagagccacuu

SEQ ID NO: 14830 - DNA, 21 bp, Homo sapiens
tatgccaactggctggtggtg

SEQ ID NO: 14831 - RNA, 21 nt, RNAi-sense strand
ugccaacuggcuggugguguu

SEQ ID NO: 14832 - RNA, 21 nt, RNAi-antisense strand
caccaccagccaguuggcauu

SEQ ID NO: 14833 - DNA, 21 bp, Homo sapiens
tacacattcggcaaagtacag

SEQ ID NO: 14834 - RNA, 21 nt, RNAi-sense strand
cacauucggcaaaguacaguu

SEQ ID NO: 14835 - RNA, 21 nt, RNAi-antisense strand
cuguacuuugccgaauguguu

SEQ ID NO: 14836 - DNA, 21 bp, Homo sapiens
tactggaaggcgcagcgttac

SEQ ID NO: 14837 - RNA, 21 nt, RNAi-sense strand
cuggaaggcgcagcguuacuu

SEQ ID NO: 14838 - RNA, 21 nt, RNAi-antisense strand
guaacgcugcgccuuccaguu

SEQ ID NO: 14839 - DNA, 21 bp, Homo sapiens
tacctttctaaggaagccgag

SEQ ID NO: 14840 - RNA, 21 nt, RNAi-sense strand
ccuuucuaaggaagccgaguu

SEQ ID NO: 14841 - RNA, 21 nt, RNAi-antisense strand
cucggcuuccuuagaaagguu

SEQ ID NO: 14842 - DNA, 21 bp, Homo sapiens
taaggaagccgagcggaagct

SEQ ID NO: 14843 - RNA, 21 nt, RNAi-sense strand
aggaagccgagcggaagcuuu

SEQ ID NO: 14844 - RNA, 21 nt, RNAi-antisense strand
agcuuccgcucggcuuccuuu

SEQ ID NO: 14845 - DNA, 21 bp, Homo sapiens
taaggagaactttctgctggc

SEQ ID NO: 14846 - RNA, 21 nt, RNAi-sense strand
aggagaacuuucugcuggcuu

SEQ ID NO: 14847 - RNA, 21 nt, RNAi-antisense strand
gccagcagaaaguucuccuuu

SEQ ID NO: 14848 - DNA, 21 bp, Homo sapiens
tacgaacagcgcctgaaagtg

SEQ ID NO: 14849 - RNA, 21 nt, RNAi-sense strand
cgaacagcgccugaaaguguu

SEQ ID NO: 14850 - RNA, 21 nt, RNAi-antisense strand
cacuuucaggcgcuguucguu

SEQ ID NO: 14851 - DNA, 21 bp, Homo sapiens
tatccatctggaggctgcagg

SEQ ID NO: 14852 - RNA, 21 nt, RNAi-sense strand
uccaucuggaggcugcagguu

SEQ ID NO: 14853 - RNA, 21 nt, RNAi-antisense strand
ccugcagccuccagauggauu

SEQ ID NO: 14854 - DNA, 21 bp, Homo sapiens
aagatgttgacgcgaatagag

SEQ ID NO: 14855 - RNA, 21 nt, RNAi-sense strand
gauguugacgcgaauagaguu

SEQ ID NO: 14856 - RNA, 21 nt, RNAi-antisense strand
cucuauucgcgucaacaucuu

SEQ ID NO: 14857 - DNA, 21 bp, Homo sapiens
aaagacctggcgttcaagttt

SEQ ID NO: 14858 - RNA, 21 nt, RNAi-sense strand
agaccuggcguucaaguuuuu

SEQ ID NO: 14859 - RNA, 21 nt, RNAi-antisense strand
aaacuugaacgccaggucuuu

SEQ ID NO: 14860 - DNA, 21 bp, Homo sapiens
aagacctggcgttcaagtttg

SEQ ID NO: 14861 - RNA, 21 nt, RNAi-sense strand
gaccuggcguucaaguuuguu

SEQ ID NO: 14862 - RNA, 21 nt, RNAi-antisense strand
caaacuugaacgccaggucuu

SEQ ID NO: 14863 - DNA, 21 bp, Homo sapiens
aacttgctcattgccatgttc

SEQ ID NO: 14864 - RNA, 21 nt, RNAi-sense strand
cuugcucauugccauguucuu

SEQ ID NO: 14865 - RNA, 21 nt, RNAi-antisense strand
gaacauggcaaugagcaaguu

SEQ ID NO: 14866 - DNA, 21 bp, Homo sapiens
aacagcgatctctactggaag

SEQ ID NO: 14867 - RNA, 21 nt, RNAi-sense strand
cagcgaucucuacuggaaguu

SEQ ID NO: 14868 - RNA, 21 nt, RNAi-antisense strand
cuuccaguagagaucgcuguu

SEQ ID NO: 14869 - DNA, 21 bp, Homo sapiens
aatcggtgcataaggagaact

SEQ ID NO: 14870 - RNA, 21 nt, RNAi-sense strand
ucggugcauaaggagaacuuu

SEQ ID NO: 14871 - RNA, 21 nt, RNAi-antisense strand
aguucuccuuaugcaccgauu

SEQ ID NO: 14872 - DNA, 21 bp, Homo sapiens
caggtggagaggattatgacc

SEQ ID NO: 14873 - RNA, 21 nt, RNAi-sense strand
gguggagaggauuaugaccuu

SEQ ID NO: 14874 - RNA, 21 nt, RNAi-antisense strand
ggucauaauccucuccaccuu

SEQ ID NO: 14875 - DNA, 21 bp, Homo sapiens
cacagatggccatgtacttct

SEQ ID NO: 14876 - RNA, 21 nt, RNAi-sense strand
cagauggccauguacuucuuu

SEQ ID NO: 14877 - RNA, 21 nt, RNAi-antisense strand
agaaguacauggccaucuguu

SEQ ID NO: 14878 - DNA, 21 bp, Homo sapiens
catggatagtgtcattaatgg

SEQ ID NO: 14879 - RNA, 21 nt, RNAi-sense strand
uggauagugucauuaaugguu

SEQ ID NO: 14880 - RNA, 21 nt, RNAi-antisense strand
ccauuaaugacacuauccauu

SEQ ID NO: 14881 - DNA, 21 bp, Homo sapiens
cacatcttcacggtcaacaaa

SEQ ID NO: 14882 - RNA, 21 nt, RNAi-sense strand
caucuucacggucaacaaauu

SEQ ID NO: 14883 - RNA, 21 nt, RNAi-antisense strand
uuuguugaccgugaagauguu

SEQ ID NO: 14884 - DNA, 21 bp, Homo sapiens
caacttgctcattgccatgtt

SEQ ID NO: 14885 - RNA, 21 nt, RNAi-sense strand
acuugcucauugccauguuuu

SEQ ID NO: 14886 - RNA, 21 nt, RNAi-antisense strand
aacauggcaaugagcaaguuu

SEQ ID NO: 14887 - DNA, 21 bp, Homo sapiens
cagttacacattcggcaaagt

SEQ ID NO: 14888 - RNA, 21 nt, RNAi-sense strand
guuacacauucggcaaaguuu

SEQ ID NO: 14889 - RNA, 21 nt, RNAi-antisense strand
acuuugccgaauguguaacuu

SEQ ID NO: 14890 - DNA, 21 bp, Homo sapiens
caacagcgatctctactggaa

SEQ ID NO: 14891 - RNA, 21 nt, RNAi-sense strand
acagcgaucucuacuggaauu

SEQ ID NO: 14892 - RNA, 21 nt, RNAi-antisense strand
uuccaguagagaucgcuguuu

SEQ ID NO: 14893 - DNA, 21 bp, Homo sapiens
gactacaactactcggccttc

SEQ ID NO: 14894 - RNA, 21 nt, RNAi-sense strand
cuacaacuacucggccuucuu

SEQ ID NO: 14895 - RNA, 21 nt, RNAi-antisense strand
gaaggccgaguaguuguaguu

SEQ ID NO: 14896 - DNA, 21 bp, Homo sapiens
gagaagatgttgacgcgaata

SEQ ID NO: 14897 - RNA, 21 nt, RNAi-sense strand
gaagauguugacgcgaauauu

SEQ ID NO: 14898 - RNA, 21 nt, RNAi-antisense strand
uauucgcgucaacaucuucuu

SEQ ID NO: 14899 - DNA, 21 bp, Homo sapiens
gaagatgttgacgcgaataga

SEQ ID NO: 14900 - RNA, 21 nt, RNAi-sense strand
agauguugacgcgaauagauu

SEQ ID NO: 14901 - RNA, 21 nt, RNAi-antisense strand
ucuauucgcgucaacaucuuu

SEQ ID NO: 14902 - DNA, 21 bp, Homo sapiens
gatgttgacgcgaatagagaa

SEQ ID NO: 14903 - RNA, 21 nt, RNAi-sense strand
uguugacgcgaauagagaauu

SEQ ID NO: 14904 - RNA, 21 nt, RNAi-antisense strand
uucucuauucgcgucaacauu

SEQ ID NO: 14905 - DNA, 21 bp, Homo sapiens
gagctcctgacagtctattct

SEQ ID NO: 14906 - RNA, 21 nt, RNAi-sense strand
gcuccugacagucuauucuuu

SEQ ID NO: 14907 - RNA, 21 nt, RNAi-antisense strand
agaauagacugucaggagcuu

SEQ ID NO: 14908 - DNA, 21 bp, Homo sapiens
gaggaattcgagaccatagtt

SEQ ID NO: 14909 - RNA, 21 nt, RNAi-sense strand
ggaauucgagaccauaguuuu

SEQ ID NO: 14910 - RNA, 21 nt, RNAi-antisense strand
aacuauggucucgaauuccuu

SEQ ID NO: 14911 - DNA, 21 bp, Homo sapiens
gagttcgtgcgcttgctcatt

SEQ ID NO: 14912 - RNA, 21 nt, RNAi-sense strand
guucgugcgcuugcucauuuu

SEQ ID NO: 14913 - RNA, 21 nt, RNAi-antisense strand
aaugagcaagcgcacgaacuu

SEQ ID NO: 14914 - DNA, 21 bp, Homo sapiens
gaggaaagacctggcgttcaa

SEQ ID NO: 14915 - RNA, 21 nt, RNAi-sense strand
ggaaagaccuggcguucaauu

SEQ ID NO: 14916 - RNA, 21 nt, RNAi-antisense strand
uugaacgccaggucuuuccuu

SEQ ID NO: 14917 - DNA, 21 bp, Homo sapiens
gaaagacctggcgttcaagtt

SEQ ID NO: 14918 - RNA, 21 nt, RNAi-sense strand
aagaccuggcguucaaguuuu

SEQ ID NO: 14919 - RNA, 21 nt, RNAi-antisense strand
aacuugaacgccaggucuuuu

SEQ ID NO: 14920 - DNA, 21 bp, Homo sapiens
gagatatggccagcactacac

SEQ ID NO: 14921 - RNA, 21 nt, RNAi-sense strand
gauauggccagcacuacacuu

SEQ ID NO: 14922 - RNA, 21 nt, RNAi-antisense strand
guguagugcuggccauaucuu

SEQ ID NO: 14923 - DNA, 21 bp, Homo sapiens
gaggagctagagtttgacatg

SEQ ID NO: 14924 - RNA, 21 nt, RNAi-sense strand
ggagcuagaguuugacauguu

SEQ ID NO: 14925 - RNA, 21 nt, RNAi-antisense strand
caugucaaacucuagcuccuu

SEQ ID NO: 14926 - DNA, 21 bp, Homo sapiens
gaatcggtgcataaggagaac

SEQ ID NO: 14927 - RNA, 21 nt, RNAi-sense strand
aucggugcauaaggagaacuu

SEQ ID NO: 14928 - RNA, 21 nt, RNAi-antisense strand
guucuccuuaugcaccgauuu

SEQ ID NO: 14929 - DNA, 21 bp, Homo sapiens
gagtacgaacagcgcctgaaa

SEQ ID NO: 14930 - RNA, 21 nt, RNAi-sense strand
guacgaacagcgccugaaauu

SEQ ID NO: 14931 - RNA, 21 nt, RNAi-antisense strand
uuucaggcgcuguucguacuu

SEQ ID NO: 14932 - DNA, 21 bp, Homo sapiens
tacaactactcggccttcttc

SEQ ID NO: 14933 - RNA, 21 nt, RNAi-sense strand
caacuacucggccuucuucuu

SEQ ID NO: 14934 - RNA, 21 nt, RNAi-antisense strand
gaagaaggccgaguaguuguu

SEQ ID NO: 14935 - DNA, 21 bp, Homo sapiens
tacacattcggcaaagtacag

SEQ ID NO: 14936 - RNA, 21 nt, RNAi-sense strand
cacauucggcaaaguacaguu

SEQ ID NO: 14937 - RNA, 21 nt, RNAi-antisense strand
cuguacuuugccgaauguguu
